(19) United States
(12) Patent Application Publication
(10) Pub. No.: US 2024/0108752 A1
(43) Pub. Date: Apr. 4, 2024

(54) ADENOVIRAL GENE THERAPY VECTORS

(71) Applicant: Ensoma, Inc., Boston, MA (US)

(72) Inventors: Soumitra Roy, Townsend, DE (US); Ashvin Reddy Bashyam, Cambridge, MA (US)

(21) Appl. No.: 18/268,392

(22) PCT Filed: Dec. 22, 2021
(86) PCT No.: PCT/US21/64979

§ 371 Date: Jun. 20, 2023

Related U.S. Application Data
(60) Provisional application No. 63/129,233, filed on Dec. 22, 2020.

(51) Int. Cl. A61K 48/00; A61K 31/7088; A61K 31/7105; A61K 38/17; A61K 38/46; C12N 15/86

(52) U.S. Cl. CPC A61K 48/0041; A61K 31/7088; A61K 31/7105; A61K 38/1774; A61K 38/465; C12N 15/86; C12N 2710/10022; C12N 2710/10043; C12N 2710/10071

(57) ABSTRACT

The present disclosure includes adenoviral vectors characterized by efficient transduction of HSCs, e.g., for in vivo gene therapy. The present disclosure includes, among other things, Ad3, Ad7, Ad11, Ad14, Adpatentdocket@choate.com16, Ad21, Ad34, Ad37, and Ad50 vectors and genomes. Ad3, Ad7, Ad11, Ad14, Ad16, Ad21, Ad34, Ad37, and Ad50 vectors and genomes of the present disclosure can include therapeutic payloads.

### PRIORITY APPLICATION

[0001] The present application claims the benefit of U.S. Provisional Patent Application No. 63/129,233, filed Dec. 22, 2020, the content of which is hereby incorporated by reference herein in its entirety.

### BACKGROUND

[0002] Many medical conditions are caused by genetic mutation and/or are treatable, at least in part, by gene therapy. Some conditions are particularly treatable by modification of hematopoietic stem cells (HSCs). Compositions and methods for HSC gene therapy are therefore needed.

### SUMMARY

[0003] Gene therapy can treat many conditions that have a genetic component, including without limitation hemoglobinopathies, immune deficiencies, and cancers. In various gene therapies, hematopoietic stem cells (HSCs) are an important target. However, current methods and compositions for modifying HSCs are limited. For instance, some vectors for gene therapy such as lentiviruses have a relatively limited payload capacity. Others, such as adenoviral serotype 5, are characterized by substantial payload capacity but are sufficiently prevalent that a significant fraction of humans have antibodies directed against vector proteins, some of which antibodies may be neutralizing. Moreover, different viral vectors are characterized by distinct transduction efficiencies for various cell types, such as HSCs. The present disclosure identified adenoviral serotypes characterized by high payload capacity and high transduction efficiency for HSCs.

[0004] The present disclosure includes, among other things, Ad3, 7, 11, 14, 16, 21, 34, 37, or 50 vectors and Ad3, 7, 11, 14, 16, 21, 34, 37, or 50 genomes (e.g., “recombinant” or “engineered” adenoviral vectors and adenoviral genomes). Ad3, 7, 11, 14, 16, 21, 34, 37, or 50 vectors and genomes of the present disclosure can include various payloads. In various embodiments, a payload can include one or more of a nucleic acid sequence encoding a CRISPR system, base editing system, prime editing system, or other expression product. The present disclosure includes, among other things, combination adenoviral vectors and adenoviral genomes that include nucleic acid sequences encoding a plurality of expression products that together contribute to treatment of a disease or condition. The present disclosure includes, among other things, Ad3, 7, 11, 14, 16, 21, 34, 37, or 50 adenoviral vectors and Ad3, 7, 11, 14, 16, 21, 34, 37, or 50 adenoviral genomes for integration of a nucleic acid payload into a target cell genome. The present disclosure includes, among other things, Ad3, 7, 11, 14, 16, 21, 34, 37, or 50 donor vectors, Ad3, 7, 11, 14, 16, 21, 34, 37, or 50 adenoviral donor genomes, helper dependent Ad3, 7, 11, 14, 16, 21, 34, 37, or 50 adenoviral donor vectors, helper dependent Ad3, 7, 11, 14, 16, 21, 34, 37, or 50 adenoviral donor genomes, support vectors, support genomes, Ad3, 7, 11, 14, 16, 21, 34, 37, or 50 helper vectors, and Ad3, 7, 11, 14, 16, 21, 34, 37, or 50 helper genomes. For avoidance of doubt, a list of serotypes such as “Ad3, 7, 11, 14, 16, 21, 34, 37, or 50” can alternatively be written as “Ad3, Ad7, Ad11, Ad14, Ad16, Ad21, Ad34, Ad37, or Ad50.”

[0005] In at least one aspect, the present disclosure provides a method of in vivo gene therapy in a mammalian subject, the method including administering to the subject an adenoviral vector, where the adenoviral vector includes: (a) a capsid including one or more viral polypeptides of an Ad3, Ad7, Ad11, Ad14, Ad16, Ad21, Ad34, Ad37, or Ad50 serotype (e.g., having at least 80% sequence identity to a reference polypeptide of the serotype), where the one or more viral polypeptides include one or more of a: (i) fiber knob; (ii) fiber shaft; (iii) fiber tail; (iv) penton; and (v) hexon; and (b) a double-stranded DNA genome including a heterologous nucleic acid payload. In various embodiments, the genome further includes: (a) a 3′ ITR and a 5′ ITR, where each of the 3′ ITR and the 5′ ITR are of the viral polypeptide serotype (e.g., having at least 80% sequence identity to a reference sequence of the same serotype as the serotype of the viral polypeptides) (b) a packaging sequence, where the packing sequence is of the viral polypeptide serotype. In various embodiments, the method includes mobilization of hematopoietic stem cells of the subject prior to administration of the adenoviral vector. In various embodiments, the heterologous nucleic acid payload includes a selectable marker, optionally where the selectable marker is MGMTP140K. In various embodiments, the method includes administering a selecting agent to the subject, optionally where the selecting agent includes O6BG and/or BCNU. In various embodiments, the method includes administering one or more immunosuppression agents to the subject, optionally where the administration of the one or more immunosuppression agents is prior to the administration of the adenoviral vector.

[0006] In at least one aspect, the present disclosure provides an adenoviral donor vector including: (a) a capsid including one or more viral polypeptides of an Ad3, Ad7, Ad11, Ad14, Ad16, Ad21, Ad34, Ad37, or Ad50 serotype, where the one or more viral polypeptides include one or more of a: (i) fiber knob; (ii) fiber shaft; (iii) fiber tail; (iv) penton; and (v) hexon; and (b) a double-stranded DNA genome including a heterologous nucleic acid payload. In various embodiments, the genome further includes: (a) a 3′ ITR and a 5′ ITR, where each of the 3′ ITR and the 5′ ITR are of the viral polypeptide serotype; and (b) a packaging sequence, where the packing sequence is of the viral polypeptide serotype. In various embodiments, the heterologous nucleic acid payload includes a selectable marker, optionally where the selectable marker is MGMTP140K.

[0007] In various embodiments of aspects provided by the present disclosure, the one or more viral polypeptides include the: (a) fiber knob and fiber shaft; (b) fiber knob and fiber tail; (c) fiber knob and penton; (d) fiber knob and hexon; (e) fiber knob, hexon, and penton; (f) fiber shaft and fiber tail; (g) fiber shaft and penton; (h) fiber shaft and hexon; (i) fiber shaft, hexon, and penton; (j) fiber tail and penton; (k) fiber tail and hexon; (1) fiber tail, hexon, and penton; (m) fiber knob, fiber shaft, and fiber tail; (n) fiber knob, fiber shaft, and penton; (o) fiber knob, fiber shaft, and hexon; (p) fiber knob, fiber shaft, hexon, and penton; (q) fiber knob, fiber shaft, fiber tail, and penton; (r) fiber knob, fiber shaft, fiber tail, penton, and hexon; or (s) penton and hexon.

[0008] In various embodiments of aspects provided by the present disclosure, the fiber knob has a sequence that has at least 80% identity to a sequence selected from SEQ ID NOs: 14, 30, 46, 62, 78, 94, 110, 126, and 142. In various embodiments of aspects provided by the present disclosure, the fiber shaft has a sequence that has at least 80% identity to a sequence selected from SEQ ID NOs: 13, 29, 45, 61, 77, 93, 109, 125, and 141. In various embodiments of aspects provided by the present disclosure, the fiber tail has a sequence that has at least 80% identity to a sequence selected from SEQ ID NOs: 157, 158, 159, 160, 161, 162, 163, 164, and 165. In various embodiments of aspects provided by the present disclosure, the penton has a sequence that has at least 80% identity to a sequence selected from SEQ ID NOs: 15, 31, 47, 63, 79, 95, 111, 127, and 143. In various embodiments of aspects provided by the present disclosure, the hexon has a sequence that has at least 80% identity to a sequence selected from SEQ ID NOs: 16, 32, 48, 64, 80, 96, 112, 128, and 144. In various embodiments of aspects provided by the present disclosure, the adenoviral vector includes a fiber of the serotype of the viral peptides. In various embodiments of aspects provided by the present disclosure, the fiber has a sequence that has at least 80% identity to a sequence selected from SEQ ID NOs: 12, 28, 44, 60, 76, 92, 108, 124, and 140.

[0009] In various embodiments of aspects provided by the present disclosure, the adenoviral vector is a chimeric vector characterized in that the capsid includes at least one of a fiber knob, fiber shaft, fiber tail, hexon, or penton that is not of the serotype of the viral peptides.

[0010] In various embodiments of aspects provided by the present disclosure, the adenoviral vector is a helper dependent vector.

[0011] In at least one aspect, the present disclosure provides an adenoviral donor vector genome including: (a) a 3′ ITR and a 5′ ITR, where the 3′ ITR and the 5′ ITR are each of the same serotype selected from an Ad3, Ad7, Ad11, Ad14, Ad16, Ad21, Ad34, Ad37, or Ad50 serotype; (b) a packaging sequence, where the packing sequence is of the ITR serotype; and (c) a heterologous nucleic acid payload. In certain embodiments, the heterologous nucleic acid payload includes a selectable marker, optionally where the selectable marker is MGMTP140K.

[0012] In various embodiments of aspects provided by the present disclosure, the heterologous nucleic acid payload encodes a protein. In various embodiments of aspects provided by the present disclosure, the heterologous nucleic acid payload encodes a small RNA, optionally where the small RNA is an shRNA. In various embodiments of aspects provided by the present disclosure, the heterologous nucleic acid payload encodes a gene editing enzyme or system, where the gene editing is selected from CRISPR editing, base editing, prime editing, or zinc finger nuclease editing.

[0013] In various embodiments of aspects provided by the present disclosure, the heterologous nucleic acid payload encodes an agent for treatment of a condition selected from hemoglobinopathies, platelet disorders, Fanconi anemia, alpha-1 antitrypsin deficiency, sickle cell anemia, thalassemia, thalassemia intermedia, von Willebrand Disease, hemophilia A, hemophilia B, Factor V Deficiency, Factor VII Deficiency, Factor X Deficiency, Factor XI Deficiency, Factor XII Deficiency, Factor XIII Deficiency, Bernard-Soulier Syndrome, Gray Platelet Syndrome, mucopolysaccharidosis, cystic fibrosis, Tay-Sachs disease, and phenylketonuria. In various embodiments of aspects provided by the present disclosure, the heterologous nucleic acid payload encodes an agent for treatment of a condition selected from Grave's Disease, rheumatoid arthritis, pernicious anemia, Multiple Sclerosis (MS), inflammatory bowel disease, systemic lupus erythematosus (SLE), adenosine deaminase deficiency (ADA-SCID) or severe combined immunodeficiency disease (SCID), Wiskott-Aldrich syndrome (WAS), chronic granulomatous disease (CGD), Deficiency of Adenosine Deaminase 2, Fanconi anemia (FA), Battens disease, adrenoleukodystrophy (ALD) or metachromatic leukodystrophy (MLD), muscular dystrophy, pulmonary alveolar proteinosis (PAP), pyruvate kinase deficiency, Schwachman-Diamond-Blackfan anemia, dyskeratosis congenita, cystic fibrosis, Parkinson's disease, Alzheimer's disease, and amyotrophic lateral sclerosis (Lou Gehrig's disease).

[0014] In various embodiments of aspects provided by the present disclosure, the serotype of the viral polypeptides is Ad34. In various embodiments of aspects provided by the present disclosure, the serotype of the viral polypeptides is Ad3. In various embodiments of aspects provided by the present disclosure, the serotype of the viral polypeptides is Ad7. In various embodiments of aspects provided by the present disclosure, the serotype of the viral polypeptides is Ad11. In various embodiments of aspects provided by the present disclosure, the serotype of the viral polypeptides is Ad14. In various embodiments of aspects provided by the present disclosure, the serotype of the viral polypeptides is Ad16. In various embodiments of aspects provided by the present disclosure, the serotype of the viral polypeptides is Ad21. In various embodiments of aspects provided by the present disclosure, the serotype of the viral polypeptides is Ad37. In various embodiments of aspects provided by the present disclosure, the serotype of the viral polypeptides is Ad50

[0015] In various embodiments, the present disclosure provides a pharmaceutical composition including an adenoviral vector of the present disclosure, where the pharmaceutical composition is formulated for injection to a subject in need thereof.

[0016] In various embodiments, the present disclosure provides a method, vector, genome, or pharmaceutical composition in which an adenoviral vector infects and/or transduces CD34+ cells, CD34+high cells, CD34+/CD90+ cells, and/or CD34+high/CD90+ cells, optionally wherein the cells are hematopoietic cells.

### Definitions

[0017] A, An, The: As used herein, “a”, “an”, and “the” refer to one or to more than one (i.e., to at least one) of the grammatical object of the article. By way of example, “an element” discloses embodiments of exactly one element and embodiments including more than one element.

[0018] About: As used herein, term “about”, when used in reference to a value, refers to a value that is similar, in context to the referenced value. In general, those skilled in the art, familiar with the context, will appreciate the relevant degree of variance encompassed by “about” in that context. For example, in some embodiments, the term “about” may encompass a range of values that within 25%, 20%, 19%, 18%, 17%, 16%, 15%, 14%, 13%, 12%, 11%, 10%, 9%, 8%, 7%, 6%, 5%, 4%, 3%, 2%, 1%, or less of the referenced value.

[0019] Administration: As used herein, the term “administration” typically refers to administration of a composition to a subject or system to achieve delivery of an agent that is, or is included in, the composition.

[0020] Adoptive cell therapy: As used herein, “adoptive cell therapy” or “ACT” involves transfer of cells with a therapeutic activity into a subject, e.g., a subject in need of treatment for a condition, disorder, or disease. In some embodiments, ACT includes transfer into a subject of cells after ex vivo and/or in vitro engineering and/or expansion of the cells.

[0021] Affinity: As used herein, “affinity” refers to the strength of the sum total of non-covalent interactions between a particular binding agent (e.g., a viral vector), and/or a binding moiety thereof, with a binding target (e.g., a cell). Unless indicated otherwise, as used herein, “binding affinity” refers to a 1:1 interaction between a binding agent and a binding target thereof (e.g., a viral vector with a target cell of the viral vector). Those of skill in the art appreciate that a change in affinity can be described by comparison to a reference (e.g., increased or decreased relative to a reference), or can be described numerically. Affinity can be measured and/or expressed in a number of ways known in the art, including, but not limited to, equilibrium dissociation constant (K_{D}) and/or equilibrium association constant (K_{A}). K_{D} is the quotient of k_{off}/kₒₙ, whereas K_{A} is the quotient of kₒₙ/k_{off}, where kₒₙ refers to the association rate constant of, e.g., viral vector with target cell, and k_{off} refers to the dissociation of, e.g., viral vector from target cell. The kₒₙ and k_{off} can be determined by techniques known to those of skill in the art.

[0022] Agent: As used herein, the term “agent” may refer to any chemical entity, including without limitation any of one or more of an atom, molecule, compound, amino acid, polypeptide, nucleotide, nucleic acid, protein, protein complex, liquid, solution, saccharide, polysaccharide, lipid, or combination or complex thereof.

[0023] Allogeneic: As used herein, term “allogeneic” refers to any material derived from one subject which is then introduced to another subject, e.g., allogeneic HSC transplantation.

[0024] Between or From: As used herein, the term “between” refers to content that falls between indicated upper and lower, or first and second, boundaries, inclusive of the boundaries. Similarly, the term “from”, when used in the context of a range of values, indicates that the range includes content that falls between indicated upper and lower, or first and second, boundaries, inclusive of the boundaries.

[0025] Binding: As used herein, the term “binding” refers to a non-covalent association between or among two or more agents. “Direct” binding involves physical contact between agents; indirect binding involves physical interaction by way of physical contact with one or more intermediate agents. Binding between two or more agents can occur and/or be assessed in any of a variety of contexts, including where interacting agents are studied in isolation or in the context of more complex systems (e.g., while covalently or otherwise associated with a carrier agents and/or in a biological system or cell).

[0026] Cancer: As used herein, the term “cancer” refers to a condition, disorder, or disease in which cells exhibit relatively abnormal, uncontrolled, and/or autonomous growth, so that they display an abnormally elevated proliferation rate and/or aberrant growth phenotype characterized by a significant loss of control of cell proliferation. In some embodiments, a cancer can include one or more tumors. In some embodiments, a cancer can be or include cells that are precancerous (e.g., benign), malignant, pre-metastatic, metastatic, and/or non-metastatic. In some embodiments, a cancer can be or include a solid tumor. In some embodiments, a cancer can be or include a hematologic tumor.

[0027] Chimeric antigen receptor: As used herein, “Chimeric antigen receptor” or “CAR” refers to an engineered protein that includes (i) an extracellular domain that includes a moiety that binds a target antigen; (ii) a transmembrane domain; and (iii) an intracellular signaling domain that sends activating signals when the CAR is stimulated by binding of the extracellular binding moiety with a target antigen. CARs are also known as chimeric T cell receptors or chimeric immunoreceptors.

[0028] Combination therapy: As used herein, the term “combination therapy” refers to administration to a subject of to two or more agents or regimens such that the two or more agents or regimens together treat a condition, disorder, or disease of the subject. In some embodiments, the two or more therapeutic agents or regimens can be administered simultaneously, sequentially, or in overlapping dosing regimens. Those of skill in the art will appreciate that combination therapy includes but does not require that the two agents or regimens be administered together in a single composition, nor at the same time.

[0029] Control expression or activity: As used herein, a first element (e.g., a protein, such as a transcription factor, or a nucleic acid sequence, such as promoter) “controls” or “drives” expression or activity of a second element (e.g., a protein or a nucleic acid encoding an agent such as a protein) if the expression or activity of the second element is wholly or partially dependent upon status (e.g., presence, absence, conformation, chemical modification, interaction, or other activity) of the first under at least one set of conditions. Control of expression or activity can be substantial control or activity, e.g., in that a change in status of the first element can, under at least one set of conditions, result in a change in expression or activity of the second element of at least 10% (e.g., at least 20%, 30%, 40%, 50%, 60%, 70%, 80%, 90%, 100%, 2-fold, 3-fold, 4-fold, 5-fold, 10-fold, 20-fold, 30-fold, 40-fold, 50-fold, 100-fold) as compared to a reference control.

[0030] Corresponding to: As used herein, the term “corresponding to” may be used to designate the position/identity of a structural element in a compound or composition through comparison with an appropriate reference compound or composition. For example, in some embodiments, a monomeric residue in a polymer (e.g., an amino acid residue in a polypeptide or a nucleic acid residue in a polynucleotide) may be identified as “corresponding to” a residue in an appropriate reference polymer. For example, those of skill in the art appreciate that residues in a provided polypeptide or polynucleotide sequence are often designated (e.g., numbered or labeled) according to the scheme of a related reference sequence (even if, e.g., such designation does not reflect literal numbering of the provided sequence). By way of illustration, if a reference sequence includes a particular amino acid motif at positions 100-110, and a second related sequence includes the same motif at positions 110-120, the motif positions of the second related sequence can be said to “correspond to” positions 100-110 of the reference sequence. Those of skill in the art appreciate that corresponding positions can be readily identified, e.g., by alignment of sequences, and that such alignment is commonly accomplished by any of a variety of known tools, strategies, and/or algorithms, including without limitation software programs such as, for example, BLAST, CS-BLAST, CUDASW++, DIAMOND, FASTA, GGSEARCH/GLSEARCH, Genoogle, HMMER, HHpred/HHsearch, IDF, Infernal, KLAST, USEARCH, parasail, PSI-BLAST, PSI-Search, ScalaBLAST, Sequilab, SAM, SSEARCH, SWAPHI, SWAPHI-LS, SWIMM, or SWIPE.

[0031] Dosing regimen: As used herein, the term “dosing regimen” can refer to a set of one or more same or different unit doses administered to a subject, typically including a plurality of unit doses administration of each of which is separated from administration of the others by a period of time. In various embodiments, one or more or all unit doses of a dosing regimen may be the same or can vary (e.g., increase over time, decrease over time, or be adjusted in accordance with the subject and/or with a medical practitioner's determination). In various embodiments, one or more or all of the periods of time between each dose may be the same or can vary (e.g., increase over time, decrease over time, or be adjusted in accordance with the subject and/or with a medical practitioner's determination). In some embodiments, a given therapeutic agent has a recommended dosing regimen, which can involve one or more doses. Typically, at least one recommended dosing regimen of a marketed drug is known to those of skill in the art. In some embodiments, a dosing regimen is correlated with a desired or beneficial outcome when administered across a relevant population (i.e., is a therapeutic dosing regimen).

[0032] Downstream and Upstream: As used herein, the term “downstream” means that a first DNA region is closer, relative to a second DNA region, to the C-terminus of a nucleic acid that includes the first DNA region and the second DNA region. As used herein, the term “upstream” means a first DNA region is closer, relative to a second DNA region, to the N-terminus of a nucleic acid that includes the first DNA region and the second DNA region.

[0033] Effective amount: An “effective amount” is the amount of a formulation necessary to result in a desired physiological change in a subject. Effective amounts are often administered for research purposes.

[0034] Engineered: As used herein, the term “engineered” refers to the aspect of having been manipulated by the hand of man. For example, a polynucleotide is considered to be “engineered” when two or more sequences, that are not linked together in that order in nature, are manipulated by the hand of man to be directly linked to one another in the engineered polynucleotide. Those of skill in the art will appreciate that an “engineered” nucleic acid or amino acid sequence can be a recombinant nucleic acid or amino acid sequence, and can be referred to as “genetically engineered.” In some embodiments, an engineered polynucleotide includes a coding sequence and/or a regulatory sequence that is found in nature operably linked with a first sequence but is not found in nature operably linked with a second sequence, which is in the engineered polynucleotide operably linked in with the second sequence by the hand of man. In some embodiments, a cell or organism is considered to be “engineered” or “genetically engineered” if it has been manipulated so that its genetic information is altered (e.g., new genetic material not previously present has been introduced, for example by transformation, mating, somatic hybridization, transfection, transduction, or other mechanism, or previously present genetic material is altered or removed, for example by substitution, deletion, or mating). As is common practice and is understood by those of skill in the art, progeny or copies, perfect or imperfect, of an engineered polynucleotide or cell are typically still referred to as “engineered” even though the direct manipulation was of a prior entity.

[0035] Excipient: As used herein, “excipient” refers to a non-therapeutic agent that may be included in a pharmaceutical composition, for example to provide or contribute to a desired consistency or stabilizing effect. In some embodiments, suitable pharmaceutical excipients may include, for example, starch, glucose, lactose, sucrose, gelatin, malt, rice, flour, chalk, silica gel, sodium stearate, glycerol monostearate, talc, sodium chloride, dried skim milk, glycerol, propylene, glycol, water, ethanol, or the like.

[0036] Expression: As used herein, “expression” refers individually and/or cumulatively to one or more biological process that result in production from a nucleic acid sequence of an encoded agent, such as a protein. Expression specifically includes either or both of transcription and translation.

[0037] Flank: As used herein, a first element (e.g., a nucleic acid sequence or amino acid sequence) present in a contiguous sequence with a second element and a third element is “flanked” by the second element and third element if it is positioned in the contiguous sequence between the second element and the third element. Accordingly, in such arrangement, the second element and third element can be referred to as “flanking” the first element. Flanking elements can be immediately adjacent to a flanked element or separated from the flanked element by one or more relevant units. In various examples in which the contiguous sequence is a nucleic acid or amino acid sequence, and the relevant units are bases or amino acid residues, respectively, the number of units in the contiguous sequence that are between a flanked element and, independently, first and/or second flanking elements can be, e.g., 50 units or less, e.g., no more than 50, 45, 40, 35, 30, 25, 20, 15, 10, 5, 4, 3, 2, 1, or 0 units.

[0038] Fragment: As used herein, “fragment” refers a structure that includes and/or consists of a discrete portion of a reference agent (sometimes referred to as the “parent” agent). In some embodiments, a fragment lacks one or more moieties found in the reference agent. In some embodiments, a fragment includes or consists of one or more moieties found in the reference agent. In some embodiments, the reference agent is a polymer such as a polynucleotide or polypeptide. In some embodiments, a fragment of a polymer includes or consists of at least 3, 4, 5, 6, 7, 8, 9, 10, 11, 12, 13, 14, 15, 16, 17, 18, 19, 20, 25, 30, 35, 40, 45, 50, 55, 60, 65, 70, 75, 80, 85, 90, 95, 100, 110, 120, 130, 140, 150, 160, 170, 180, 190, 200, 210, 220, 230, 240, 250, 275, 300, 325, 350, 375, 400, 425, 450, 475, 500 or more monomeric units (e.g., residues) of the reference polymer. In some embodiments, a fragment of a polymer includes or consists of at least 5%, 10%, 15%, 20%, 25%, 30%, 25%, 40%, 45%, 50%, 55%, 60%, 65%, 70%, 75%, 80%, 85%, 90%, 95%, 96%, 97%, 98%, 99% or more of the monomeric units (e.g., residues) found in the reference polymer. A fragment of a reference polymer is not necessarily identical to a corresponding portion of the reference polymer. For example, a fragment of a reference polymer can be a polymer having a sequence of residues having at least 5%, 10%, 15%, 20%, 25%, 30%, 25%, 40%, 45%, 50%, 55%, 60%, 65%, 70%, 75%, 80%, 85%, 90%, 95%, 96%, 97%, 98%, 99% or more identity to the reference polymer. A fragment may, or may not, be generated by physical fragmentation of a reference agent. In some instances, a fragment is generated by physical fragmentation of a reference agent. In some instances, a fragment is not generated by physical fragmentation of a reference agent and can be instead, for example, produced by de novo synthesis or other means.

[0039] Gene, Transgene: As used herein, the term “gene” refers to a DNA sequence that is or includes coding sequence (i.e., a DNA sequence that encodes an expression product, such as an RNA product and/or a polypeptide product), optionally together with some or all of regulatory sequences that control expression of the coding sequence. In some embodiments, a gene includes non-coding sequence such as, without limitation, introns. In some embodiments, a gene may include both coding (e.g., exonic) and non-coding (e.g., intronic) sequences. In some embodiments, a gene includes a regulatory sequence that is a promoter. In some embodiments, a gene includes one or both of a (i) DNA nucleotides extending a predetermined number of nucleotides upstream of the coding sequence in a reference context, such as a source genome, and (ii) DNA nucleotides extending a predetermined number of nucleotides downstream of the coding sequence in a reference context, such as a source genome. In various embodiments, the predetermined number of nucleotides can be 500 bp, 1 kb, 2 kb, 3 kb, 4 kb, 5 kb, 10 kb, 20 kb, 30 kb, 40 kb, 50 kb, 75 kb, or 100 kb. As used herein, a “transgene” refers to a gene that is not endogenous or native to a reference context in which the gene is present or into which the gene may be placed by engineering.

[0040] Gene product or expression product: As used herein, the term “gene product” or “expression product” generally refers to an RNA transcribed from the gene (pre- and/or post-processing) or a polypeptide (pre- and/or post-modification) encoded by an RNA transcribed from the gene.

[0041] Host cell, target cell: As used herein, “host cell” refers to a cell into which exogenous DNA (recombinant or otherwise), such as a transgene, has been introduced. Those of skill in the art appreciate that a “host cell” can be the cell into which the exogenous DNA was initially introduced and/or progeny or copies, perfect or imperfect, thereof. In some embodiments, a host cell includes one or more viral genes or transgenes. In some embodiments, an intended or potential host cell can be referred to as a target cell.

[0042] In various embodiments, a host cell or target cell is identified by the presence, absence, or expression level of various surface markers.

[0043] A statement that a cell or population of cells is “positive” for or expressing a particular marker refers to the detectable presence on or in the cell of the particular marker. When referring to a surface marker, the term can refer to the presence of surface expression as detected by flow cytometry, for example, by staining with an antibody that specifically binds to the marker and detecting said antibody, wherein the staining is detectable by flow cytometry at a level substantially above the staining detected carrying out the same procedure with an isotype-matched control under otherwise identical conditions and/or at a level substantially similar to that for cell known to be positive for the marker, and/or at a level substantially higher than that for a cell known to be negative for the marker.

[0044] A statement that a cell or population of cells is “negative” for a particular marker or lacks expression of a marker refers to the absence of substantial detectable presence on or in the cell of a particular marker. When referring to a surface marker, the term can refer to the absence of surface expression as detected by flow cytometry, for example, by staining with an antibody that specifically binds to the marker and detecting said antibody, wherein the staining is not detected by flow cytometry at a level substantially above the staining detected carrying out the same procedure with an isotype-matched control under otherwise identical conditions, and/or at a level substantially lower than that for cell known to be positive for the marker, and/or at a level substantially similar as compared to that for a cell known to be negative for the marker.

[0045] Identity: As used herein, the term “identity” refers to the overall relatedness between polymeric molecules, e.g., between nucleic acid molecules (e.g., DNA molecules and/or RNA molecules) and/or between polypeptide molecules. Methods for the calculation of a percent identity as between two provided sequences are known in the art. The term “% sequence identity” refers to a relationship between two or more sequences, as determined by comparing the sequences. In the art, “identity” also means the degree of sequence relatedness between protein and nucleic acid sequences as determined by the match between strings of such sequences. “Identity” (often referred to as “similarity”) can be readily calculated by known methods, including those described in: Computational Molecular Biology (Lesk, A. M., ed.) Oxford University Press, N Y (1988); Biocomputing: Informatics and Genome Projects (Smith, D. W., ed.) Academic Press, N Y (1994); Computer Analysis of Sequence Data, Part I (Griffin, A. M., and Griffin, H. G., eds.) Humana Press, N J (1994); Sequence Analysis in Molecular Biology (Von Heijne, G., ed.) Academic Press (1987); and Sequence Analysis Primer (Gribskov, M. and Devereux, J., eds.) Oxford University Press, NY (1992). Preferred methods to determine identity are designed to give the best match between the sequences tested. Methods to determine identity and similarity are codified in publicly available computer programs. For instance, calculation of the percent identity of two nucleic acid or polypeptide sequences, for example, can be performed by aligning the two sequences (or the complement of one or both sequences) for optimal comparison purposes (e.g., gaps can be introduced in one or both of a first and a second sequences for optimal alignment and non-identical sequences can be disregarded for comparison purposes). The nucleotides or amino acids at corresponding positions are then compared. When a position in the first sequence is occupied by the same residue (e.g., nucleotide or amino acid) as the corresponding position in the second sequence, then the molecules are identical at that position. The percent identity between the two sequences is a function of the number of identical positions shared by the sequences, optionally accounting for the number of gaps, and the length of each gap, which may need to be introduced for optimal alignment of the two sequences. The comparison of sequences and determination of percent identity between two sequences can be accomplished using a computational algorithm, such as BLAST (basic local alignment search tool). Sequence alignments and percent identity calculations may be performed using the Megalign program of the LASERGENE bioinformatics computing suite (DNASTAR, Inc., Madison, Wisconsin). Multiple alignment of the sequences can also be performed using the Clustal method of alignment (Higgins and Sharp CABIOS, 5, 151-153 (1989) with default parameters (GAP PENALTY=10, GAP LENGTH PENALTY=10). Relevant programs also include the GCG suite of programs (Wisconsin Package Version 9.0, Genetics Computer Group (GCG), Madison, Wisconsin); BLASTP, BLASTN, BLASTX (Altschul et al., J. Mol. Biol. 215:403-410 (1990); DNASTAR (DNASTAR, Inc., Madison, Wisconsin); and the FASTA program incorporating the Smith-Waterman algorithm (Pearson, Comput. Methods Genome Res., [Proc. Int. Symp.] (1994), Meeting Date 1992, 111-20. Editor(s): Suhai, Sandor. Publisher: Plenum, New York, N.Y. Within the context of this disclosure it will be understood that where sequence analysis software is used for analysis, the results of the analysis are based on the “default values” of the program referenced. “Default values” will mean any set of values or parameters, which originally load with the software when first initialized.

[0046] “Improve,” “increase,” “inhibit,” or “reduce”: As used herein, the terms “improve”, “increase”, “inhibit”, and “reduce”, and grammatical equivalents thereof, indicate qualitative or quantitative difference from a reference.

[0047] Isolated: As used herein, “isolated” refers to a substance and/or entity that has been (1) separated from at least some of the components with which it was associated when initially produced (whether in nature and/or in an experimental setting), and/or (2) designed, produced, prepared, and/or manufactured by the hand of man. Isolated substances and/or entities may be separated from 10%, 20%, 30%, 40%, 50%, 60%, 70%, 80%, 90%, 91%, 92%, 93%, 94%, 95%, 96%, 97%, 98%, 99%, or more than 99% of the other components with which they were initially associated. In some embodiments, isolated agents are 80%, 85%, 90%, 91%, 92%, 93%, 94%, 95%, 96%, 97%, 98%, 99%, or more than 99% pure. As used herein, a substance is “pure” if it is substantially free of other components. In some embodiments, as will be understood by those skilled in the art, a substance may still be considered “isolated” or even “pure”, after having been combined with certain other components such as, for example, one or more carriers or excipients (e.g., buffer, solvent, water, etc.); in such embodiments, percent isolation or purity of the substance is calculated without including such carriers or excipients. To give but one example, in some embodiments, a biological polymer such as a polypeptide or polynucleotide that occurs in nature is considered to be “isolated” when, a) by virtue of its origin or source of derivation is not associated with some or all of the components that accompany it in its native state in nature; b) it is substantially free of other polypeptides or nucleic acids of the same species from the species that produces it in nature; c) is expressed by or is otherwise in association with components from a cell or other expression system that is not of the species that produces it in nature. Thus, for instance, in some embodiments, a polypeptide that is chemically synthesized or is synthesized in a cellular system different from that which produces it in nature is considered to be an “isolated” polypeptide. Alternatively or additionally, in some embodiments, a polypeptide that has been subjected to one or more purification techniques may be considered to be an “isolated” polypeptide to the extent that it has been separated from other components a) with which it is associated in nature; and/or b) with which it was associated when initially produced.

[0048] Operably linked: As used herein, “operably linked” or “operatively linked” refers to the association of at least a first element and a second element such that the component elements are in a relationship permitting them to function in their intended manner. For example, a nucleic acid regulatory sequence is “operably linked” to a nucleic acid coding sequence if the regulatory sequence and coding sequence are associated in a manner that permits control of expression of the coding sequence by the regulatory sequence. In some embodiments, an “operably linked” regulatory sequence is directly or indirectly covalently associated with a coding sequence (e.g., in a single nucleic acid). In some embodiments, a regulatory sequence controls expression of a coding sequence in trans and inclusion of the regulatory sequence in the same nucleic acid as the coding sequence is not a requirement of operable linkage.

[0049] Pharmaceutically acceptable: As used herein, the term “pharmaceutically acceptable,” as applied to one or more, or all, component(s) for formulation of a composition as disclosed herein, means that each component must be compatible with the other ingredients of the composition and not deleterious to the recipient thereof.

[0050] Pharmaceutically acceptable carrier: As used herein, the term “pharmaceutically acceptable carrier” refers to a pharmaceutically-acceptable material, composition, or vehicle, such as a liquid or solid filler, diluent, excipient, or solvent encapsulating material, that facilitates formulation of an agent (e.g., a pharmaceutical agent), modifies bioavailability of an agent, or facilitates transport of an agent from one organ or portion of a subject to another. Some examples of materials which can serve as pharmaceutically-acceptable carriers include: sugars, such as lactose, glucose and sucrose; starches, such as corn starch and potato starch; cellulose, and its derivatives, such as sodium carboxymethyl cellulose, ethyl cellulose and cellulose acetate; powdered tragacanth; malt; gelatin; talc; excipients, such as cocoa butter and suppository waxes; oils, such as peanut oil, cottonseed oil, safflower oil, sesame oil, olive oil, corn oil and soybean oil; glycols, such as propylene glycol; polyols, such as glycerin, sorbitol, mannitol and polyethylene glycol; esters, such as ethyl oleate and ethyl laurate; agar; buffering agents, such as magnesium hydroxide and aluminum hydroxide; alginic acid; pyrogen-free water; isotonic saline; Ringer's solution; ethyl alcohol; pH buffered solutions; polyesters, polycarbonates and/or polyanhydrides; and other non-toxic compatible substances employed in pharmaceutical formulations.

[0051] Pharmaceutical composition: As used herein, the term “pharmaceutical composition” refers to a composition in which an active agent is formulated together with one or more pharmaceutically acceptable carriers.

[0052] Promoter: As used herein, a “promoter” or “promoter sequence” can be a DNA regulatory region that directly or indirectly (e.g., through promoter-bound proteins or substances) participates in initiation and/or processivity of transcription of a coding sequence. A promoter may, under suitable conditions, initiate transcription of a coding sequence upon binding of one or more transcription factors and/or regulatory moieties with the promoter. A promoter that participates in initiation of transcription of a coding sequence can be “operably linked” to the coding sequence. In certain instances, a promoter can be or include a DNA regulatory region that extends from a transcription initiation site (at its 3′ terminus) to an upstream (5′ direction) position such that the sequence so designated includes one or both of a minimum number of bases or elements necessary to initiate a transcription event. A promoter may be, include, or be operably associated with or operably linked to, expression control sequences such as enhancer and repressor sequences. In some embodiments, a promoter may be inducible. In some embodiments, a promoter may be a constitutive promoter. In some embodiments, a conditional (e.g., inducible) promoter may be unidirectional or bi-directional. A promoter may be or include a sequence identical to a sequence known to occur in the genome of particular species. In some embodiments, a promoter can be or include a hybrid promoter, in which a sequence containing a transcriptional regulatory region can be obtained from one source and a sequence containing a transcription initiation region can be obtained from a second source. Systems for linking control elements to coding sequence within a transgene are well known in the art (general molecular biological and recombinant DNA techniques are described in Sambrook, Fritsch, and Maniatis, Molecular Cloning: A Laboratory Manual, Second Edition, Cold Spring Harbor Laboratory Press, Cold Spring Harbor, N Y, 1989).

[0053] Reference: As used herein, “reference” refers to a standard or control relative to which a comparison is performed. For example, in some embodiments, an agent, sample, sequence, subject, animal, or individual, or population thereof, or a measure or characteristic representative thereof, is compared with a reference, an agent, sample, sequence, subject, animal, or individual, or population thereof, or a measure or characteristic representative thereof. In some embodiments, a reference is a measured value. In some embodiments, a reference is an established standard or expected value. In some embodiments, a reference is a historical reference. A reference can be quantitative of qualitative. Typically, as would be understood by those of skill in the art, a reference and the value to which it is compared represents measure under comparable conditions. Those of skill in the art will appreciate when sufficient similarities are present to justify reliance on and/or comparison. In some embodiments, an appropriate reference may be an agent, sample, sequence, subject, animal, or individual, or population thereof, under conditions those of skill in the art will recognize as comparable, e.g., for the purpose of assessing one or more particular variables (e.g., presence or absence of an agent or condition), or a measure or characteristic representative thereof. Without wishing to be bound by any particular embodiment(s), in various embodiments a reference sequence can be a sequence associated with a sequence accession number provided herein, certain of which sequences associated with sequence accession numbers are provided in FIG. 40.

[0054] Regulatory sequence: As used herein in the context of expression of a nucleic acid coding sequence, a regulatory sequence is a nucleic acid sequence that controls expression of a coding sequence. In some embodiments, a regulatory sequence can control or impact one or more aspects of gene expression (e.g., cell-type-specific expression, inducible expression, etc.).

[0055] Subject: As used herein, the term “subject” refers to an organism, typically a mammal (e.g., a human, rat, or mouse). In some embodiments, a subject is suffering from a disease, disorder or condition. In some embodiments, a subject is susceptible to a disease, disorder, or condition. In some embodiments, a subject displays one or more symptoms or characteristics of a disease, disorder or condition. In some embodiments, a subject is not suffering from a disease, disorder or condition. In some embodiments, a subject does not display any symptom or characteristic of a disease, disorder, or condition. In some embodiments, a subject has one or more features characteristic of susceptibility to or risk of a disease, disorder, or condition. In some embodiments, a subject is a subject that has been tested for a disease, disorder, or condition, and/or to whom therapy has been administered. In some instances, a human subject can be interchangeably referred to as a “patient” or “individual.”

[0056] Therapeutic agent: As used herein, the term “therapeutic agent” refers to any agent that elicits a desired pharmacological effect when administered to a subject. In some embodiments, an agent is considered to be a therapeutic agent if it demonstrates a statistically significant effect across an appropriate population. In some embodiments, the appropriate population can be a population of model organisms or a human population. In some embodiments, an appropriate population can be defined by various criteria, such as a certain age group, gender, genetic background, preexisting clinical conditions, etc. In some embodiments, a therapeutic agent is a substance that can be used for treatment of a disease, disorder, or condition. In some embodiments, a therapeutic agent is an agent that has been or is required to be approved by a government agency before it can be marketed for administration to humans. In some embodiments, a therapeutic agent is an agent for which a medical prescription is required for administration to humans.

[0057] Therapeutically effective amount: As used herein, “therapeutically effective amount” refers to an amount that produces the desired effect for which it is administered. In some embodiments, the term refers to an amount that is sufficient, when administered to a population suffering from or susceptible to a disease, disorder, and/or condition in accordance with a therapeutic dosing regimen, to treat the disease, disorder, and/or condition. In some embodiments, a therapeutically effective amount is one that reduces the incidence and/or severity of, and/or delays onset of, one or more symptoms of the disease, disorder, and/or condition. Those of ordinary skill in the art will appreciate that the term “therapeutically effective amount” does not in fact require successful treatment be achieved in a particular individual. Rather, a therapeutically effective amount may be that amount that provides a particular desired pharmacological response in a significant number of subjects when administered to patients in need of such treatment. In some embodiments, reference to a therapeutically effective amount may be a reference to an amount as measured in one or more specific tissues (e.g., a tissue affected by the disease, disorder or condition) or fluids (e.g., blood, saliva, serum, sweat, tears, urine, etc.). Those of ordinary skill in the art will appreciate that, in some embodiments, a therapeutically effective amount of a particular agent or therapy may be formulated and/or administered in a single dose. In some embodiments, a therapeutically effective agent may be formulated and/or administered in a plurality of doses, for example, as part of a dosing regimen.

[0058] Treatment: As used herein, the term “treatment” (also “treat” or “treating”) refers to administration of a therapy that partially or completely alleviates, ameliorates, relieves, inhibits, delays onset of, reduces severity of, and/or reduces incidence of one or more symptoms, features, and/or causes of a particular disease, disorder, or condition, or is administered for the purpose of achieving any such result. In some embodiments, such treatment can be of a subject who does not exhibit signs of the relevant disease, disorder, or condition and/or of a subject who exhibits only early signs of the disease, disorder, or condition. Alternatively or additionally, such treatment can be of a subject who exhibits one or more established signs of the relevant disease, disorder and/or condition. In some embodiments, treatment can be of a subject who has been diagnosed as suffering from the relevant disease, disorder, and/or condition. In some embodiments, treatment can be of a subject known to have one or more susceptibility factors that are statistically correlated with increased risk of development of the relevant disease, disorder, or condition. A “prophylactic treatment” includes a treatment administered to a subject who does not display signs or symptoms of a condition to be treated or displays only early signs or symptoms of the condition to be treated such that treatment is administered for the purpose of diminishing, preventing, or decreasing the risk of developing the condition. Thus, a prophylactic treatment functions as a preventative treatment against a condition. A “therapeutic treatment” includes a treatment administered to a subject who displays symptoms or signs of a condition and is administered to the subject for the purpose of reducing the severity or progression of the condition.

[0059] Unit dose: As used herein, the term “unit dose” refers to an amount administered as a single dose and/or in a physically discrete unit of a pharmaceutical composition. In many embodiments, a unit dose contains a predetermined quantity of an active agent, for instance a predetermined viral titer (the number of viruses, virions, or viral particles in a given volume). In some embodiments, a unit dose contains an entire single dose of the agent. In some embodiments, more than one unit dose is administered to achieve a total single dose. In some embodiments, administration of multiple unit doses is required, or expected to be required, in order to achieve an intended effect. A unit dose can be, for example, a volume of liquid (e.g., an acceptable carrier) containing a predetermined quantity of one or more therapeutic moieties, a predetermined amount of one or more therapeutic moieties in solid form, a sustained release formulation or drug delivery device containing a predetermined amount of one or more therapeutic moieties, etc. It will be appreciated that a unit dose can be present in a formulation that includes any of a variety of components in addition to the therapeutic moiety(s). For example, acceptable carriers (e.g., pharmaceutically acceptable carriers), diluents, stabilizers, buffers, preservatives, etc., can be included. It will be appreciated by those skilled in the art, in many embodiments, a total appropriate daily dosage of a particular therapeutic agent can include a portion, or a plurality, of unit doses, and can be decided, for example, by a medical practitioner within the scope of sound medical judgment. In some embodiments, the specific effective dose level for any particular subject or organism can depend upon a variety of factors including the disorder being treated and the severity of the disorder; activity of specific active compound employed; specific composition employed; age, body weight, general health, sex, and diet of the subject; time of administration, and rate of excretion of the specific active compound employed; duration of the treatment; drugs and/or additional therapies used in combination or coincidental with specific compound(s) employed, and like factors well known in the medical arts.

### BRIEF DESCRIPTION OF THE DRAWING

[0060] FIG. 1 is a chart showing results of anti-hexon staining of CD34+ cells three hours after infection of the cells with indicated adenoviral serotypes. Cells were infected at 5,000 viral particles per cell or 2,000 viral particles per cell. For each tested serotype, the chart includes two replicates of data, each replicate including, in the order shown, results of analysis at 5,000 viral particles per cell and 2,000 viral particles per cell. Data represent infection efficiency.

[0061] FIG. 2 is a chart showing results of qPCR analysis of adenoviral DNA in CD34+ cells infected with the indicated adenoviral serotypes. Cells were infected at 5,000 viral particles per cell or 2,000 viral particles per cell. For each tested serotype, the chart includes two replicates of data, each replicate including, in the order shown, results of analysis at 5,000 viral particles per cell and 2,000 viral particles per cell. Data represent relative infection efficiency.

[0062] FIG. 3 is a chart showing results of anti-hexon staining of CD34+ cells from Donor 1 three hours after infection of the cells with indicated adenoviral serotypes. Cells were infected at 2,000 viral particles per cell. For each tested serotype, the chart includes two replicates of data. Data represent infection efficiency.

[0063] FIG. 4 is a chart showing results of anti-hexon staining of CD34+ cells from Donor 1 six hours after infection of the cells with indicated adenoviral serotypes. Cells were infected at 2,000 viral particles per cell. For each tested serotype, the chart includes two replicates of data. Data represent infection efficiency.

[0064] FIG. 5 is a chart showing results of anti-hexon staining of CD34+ cells from Donor 1 three hours after infection of the cells with indicated adenoviral serotypes. Cells were infected at 5,000 viral particles per cell. For each tested serotype, the chart includes two replicates of data. Data represent infection efficiency.

[0065] FIG. 6 is a chart showing results of anti-hexon staining of CD34+ cells from Donor 1 six hours after infection of the cells with indicated adenoviral serotypes. Cells were infected at 5,000 viral particles per cell. For each tested serotype, the chart includes two replicates of data. Data represent infection efficiency.

[0066] FIG. 7 is a chart showing results of anti-hexon staining of CD34+ cells from Donor 2 three hours after infection of the cells with indicated adenoviral serotypes. Cells were infected at 2,000 viral particles per cell. For each tested serotype, the chart includes two replicates of data. Data represent infection efficiency. Two replicate preparations of serotype F35 were tested. GLN indicates that the indicated adenoviral vector included an expression cassette encoding a GFP luminescence reporter.

[0067] FIG. 8 is a chart showing results of anti-hexon staining of CD34+ cells from Donor 2 six hours after infection of the cells with indicated adenoviral serotypes. Cells were infected at 2,000 viral particles per cell. For each tested serotype, the chart includes three replicates of data. Data represent infection efficiency.

[0068] FIG. 9 is a chart showing results of anti-hexon staining of CD34+ cells from Donor 2 three hours after infection of the cells with indicated adenoviral serotypes. Cells were infected at 5,000 viral particles per cell. For each tested serotype, the chart includes three replicates of data. Data represent infection efficiency.

[0069] FIG. 10 is a chart showing results of anti-hexon staining of CD34+ cells from Donor 2 six hours after infection of the cells with indicated adenoviral serotypes. Cells were infected at 5,000 viral particles per cell. For each tested serotype, the chart includes three replicates of data. Data represent infection efficiency.

[0070] FIG. 11 is a chart showing results of anti-hexon staining of CD34+ cells from Donor 3 three hours after infection of the cells with indicated adenoviral serotypes. Cells were infected at 2,000 viral particles per cell. For each tested serotype, the chart includes three replicates of data. Data represent infection efficiency.

[0071] FIG. 12 is a chart showing results of anti-hexon staining of CD34+ cells from Donor 3 six hours after infection of the cells with indicated adenoviral serotypes. Cells were infected at 2,000 viral particles per cell. For each tested serotype, the chart includes two or three replicates of data. Data represent infection efficiency.

[0072] FIG. 13 is a chart showing results of anti-hexon staining of CD34+ cells from Donor 3 three or six hours after infection of the cells with indicated adenoviral serotypes. Cells were infected at 5,000 viral particles per cell. For each tested serotype, the chart includes two replicates of data, each replicate including, in the order shown, results of analysis at three hours and six hours after infection. Data represent infection efficiency.

[0073] FIG. 14 is a chart showing results of qPCR analysis of adenoviral DNA in CD34+ cells from Donor 1 three hours after infection of the cells with indicated adenoviral serotypes. Cells were infected at 2,000 viral particles per cell. For each tested serotype, the chart includes two replicates of data. Error bars represent technical replicates. Data represent relative infection efficiency.

[0074] FIG. 15 is a chart showing results of qPCR analysis of adenoviral DNA in CD34+ cells from Donor 1 six hours after infection of the cells with indicated adenoviral serotypes. Cells were infected at 2,000 viral particles per cell. For each tested serotype, the chart includes two replicates of data. Data represent relative infection efficiency.

[0075] FIG. 16 is a chart showing results of qPCR analysis of adenoviral DNA in CD34+ cells from Donor 1 three hours after infection of the cells with indicated adenoviral serotypes. Cells were infected at 5,000 viral particles per cell. For each tested serotype, the chart includes two replicates of data. Error bars represent technical replicates. Data represent relative infection efficiency.

[0076] FIG. 17 is a chart showing results of qPCR analysis of adenoviral DNA in CD34+ cells from Donor 1 six hours after infection of the cells with indicated adenoviral serotypes. Cells were infected at 5,000 viral particles per cell. For each tested serotype, the chart includes two replicates of data. Data represent relative infection efficiency.

[0077] FIG. 18 is a chart showing results of qPCR analysis of adenoviral DNA in CD34+ cells from Donor 2 three hours after infection of the cells with indicated adenoviral serotypes. Cells were infected at 2,000 viral particles per cell. For each tested serotype, the chart includes two replicates of data. Error bars represent technical replicates. Data represent relative infection efficiency.

[0078] FIG. 19 is a chart showing results of qPCR analysis of adenoviral DNA in CD34+ cells from Donor 2 six hours after infection of the cells with indicated adenoviral serotypes. Cells were infected at 2,000 viral particles per cell. For each tested serotype, the chart includes three replicates of data. Error bars represent technical replicates. Data represent relative infection efficiency.

[0079] FIG. 20 is a chart showing results of qPCR analysis of adenoviral DNA in CD34+ cells from Donor 2 three hours after infection of the cells with indicated adenoviral serotypes. Cells were infected at 5,000 viral particles per cell. For each tested serotype, the chart includes three replicates of data. Error bars represent technical replicates. Data represent relative infection efficiency.

[0080] FIG. 21 is a chart showing results of qPCR analysis of adenoviral DNA in CD34+ cells from Donor 2 six hours after infection of the cells with indicated adenoviral serotypes. Cells were infected at 5,000 viral particles per cell. For each tested serotype, the chart includes three replicates of data. Error bars represent technical replicates. Data represent relative infection efficiency.

[0081] FIG. 22 is a chart showing results of qPCR analysis of adenoviral DNA in CD34+ cells from Donor 3 three hours after infection of the cells with indicated adenoviral serotypes. Cells were infected at 2,000 viral particles per cell. For each tested serotype, the chart includes three replicates of data. Error bars represent technical replicates. Data represent relative infection efficiency.

[0082] FIG. 23 is a chart showing results of qPCR analysis of adenoviral DNA in CD34+ cells from Donor 3 six hours after infection of the cells with indicated adenoviral serotypes. Cells were infected at 2,000 viral particles per cell. For each tested serotype, the chart includes two or three replicates of data. Error bars represent technical replicates. Data represent relative infection efficiency.

[0083] FIG. 24 is a chart showing results of qPCR analysis of adenoviral DNA in CD34+ cells from Donor 2 three or six hours after infection of the cells with indicated adenoviral serotypes. Cells were infected at 5,000 viral particles per cell. For each tested serotype, the chart includes two replicates of data, each replicate including, in the order shown, results of analysis at three hours and six hours after infection. Error bars represent technical replicates. Data represent relative infection efficiency.

[0084] FIG. 25 is an image of a gel showing digestion of first generation adenoviral genomes of serotype Ad11 obtained from an Ad preparation produced from HEK293 cells transfected with a plasmid including a first generation adenoviral genome of serotype Ad11. As indicated in the table included in the figure, the purified adenoviral genomes were digested with either BspHI (lane 3) or SmaI (lane 5), while parental plasmids were also digested for comparison (lanes 2 and 4, respectively). A representation of the predicted digestion fragments based on the sequences of the Ad genome and plasmid is also shown.

[0085] FIG. 26 is an image of a gel showing digestion of first generation adenoviral genomes of serotype Ad34 obtained from an Ad preparation produced from HEK293 cells transfected with a plasmid including a first generation adenoviral genome of serotype Ad34. As indicated in the table included in the figure, the purified adenoviral genomes were digested with either SmaI (lane 2) or SspI (lane 3). A representation of the predicted digestion fragments based on the sequence of the Ad genome is also shown.

[0086] FIG. 27 is an image of a gel showing digestion of first generation Ad35++ genomes obtained from an Ad preparation produced from HEK293 cells transfected with a plasmid including a first generation Ad35++ genome. As indicated in the table included in the figure, the purified adenoviral genomes were digested with BspHI (lane 2), while parental plasmid was also digested for comparison (lane 3). A representation of the predicted digestion fragments based on the sequences of the Ad genome and plasmid is also shown. * indicates a lane with a repeated sample.

[0087] FIG. 28 are images of gels showing digestion of first generation Ad35++ genomes obtained from an Ad preparation produced from HEK293 cells transfected with a plasmid including a first generation Ad35++ genome. The gel labelled Observed #1 was electrophoresed for a longer duration to resolve large DNA fragments, while the gel labelled Observed #2 was electrophoresed for a shorter duration to resolve shorter DNA fragments. As indicated in the table included in the figure, the purified adenoviral genomes were digested with SmaI (lane 2), while parental plasmid was also digested for comparison (lane 3). A representation of the predicted digestion fragments based on the sequences of the Ad genome and plasmid is also shown.

[0088] FIG. 29 is a chart showing results of GFP analysis of HEK293 cells 25 hours after infection of the cells with first generation adenoviral vectors of the indicated adenoviral serotypes. Cells were infected at 100, 200, 500, and 1,000 viral particles per cell. Data represent infection efficiency. NTC indicates non-treated control.

[0089] FIG. 30 is a chart showing results of GFP analysis of HEK293 cells 24 hours after infection of the cells with first generation adenoviral vectors of the indicated adenoviral serotypes. Cells were infected at 100, 200, 500, 1,000, and 2,000 viral particles per cell. Data represent infection efficiency.

[0090] FIG. 31 is a chart showing results of GFP analysis of K562 cells 24 hours after infection of the cells with first generation adenoviral vectors of the indicated adenoviral serotypes. Cells were infected at 100, 200, 500, 1,000, and 2,000 viral particles per cell. Data represent infection efficiency.

[0091] FIG. 32 is a chart showing results of GFP analysis of CD34+ cells from Donor 2 48 hours after infection of the cells with first generation adenoviral vectors of the indicated adenoviral serotypes. Cells were infected at 500, 2,000, and 5,000 viral particles per cell. For conditions using 2,000 and 5,000 viral particles per cell, the chart includes two replicates of data. Data represent infection efficiency.

[0092] FIG. 33 depicts the gating used for analysis CD34+ and CD34+/CD90+ populations using flow cytometry. Purified CD34+ cells were stained with anti-CD34 and anti-CD90 antibodies and transduction efficiency was measured in CD34+high/CD90+ cells. Boxes indicate gates used to define a population of cells. Arrows from one plot to another indicate that the gated population in the first plot is being displayed in the second plot. Percentages indicate the percent of cells contained with each indicated gate. The data shown in this figure corresponds to CD34+ cells from Donor 1, 46 hours after infection of the cells with first generation adenoviral vector of serotype Ad34 at 5,000 viral particles per cell.

[0093] FIG. 34 is a chart showing results of GFP analysis of CD34+ cells and CD34+/CD90+ cells from Donor 1 46 hours after infection of the cells with first generation adenoviral vectors of the indicated adenoviral serotypes. Percent of cells that are GFP positive is shown. Cells were infected at 2,000 and 5,000 viral particles per cell. Data represent infection efficiency. * indicates an absence of data collected for the indicated condition.

[0094] FIG. 35 is a chart showing results of GFP analysis of CD34+ cells and CD34+/CD90+ cells from Donor 3 46 hours after infection of the cells with first generation adenoviral vectors of the indicated adenoviral serotypes. Percent of cells that are GFP positive is shown. Cells were infected at 500, 2,000, and 5,000 viral particles per cell. Data represent infection efficiency.

[0095] FIG. 36 is a chart showing results of GFP analysis of CD34+ cells and CD34+/CD90+ cells from Donor 1 46 hours after infection of the cells with first generation adenoviral vectors of the indicated adenoviral serotypes. Geometric mean fluorescence intensity (MFI) of GFP for GFP positive cells is shown. Cells were infected at 2,000 and 5,000 viral particles per cell. Data represent infection efficiency. * indicates an absence of data collected for the indicated condition.

[0096] FIG. 37 is a chart showing results of GFP analysis of CD34+ cells and CD34+/CD90+ cells from Donor 3 46 hours after infection of the cells with first generation adenoviral vectors of the indicated adenoviral serotypes. Geometric mean fluorescence intensity (MFI) of GFP for GFP positive cells is shown. Cells were infected at 500, 2,000, and 5,000 viral particles per cell. Data represent infection efficiency.

[0097] FIG. 38 is a chart showing results of qPCR analysis of adenoviral DNA in HEK293 cells three hours after infection of the cells with indicated adenoviral serotypes. Cells were infected at 100 and 500 viral particles per cell. Data represent relative infection efficiency.

[0098] FIG. 39 is a chart showing results of qPCR analysis of adenoviral DNA in CD34+ cells from Donor 2 three hours after infection of the cells with indicated adenoviral serotypes. Cells were infected at 500, 2,000, and 5,000 viral particles per cell. For conditions using 2,000 and 5,000 viral particles per cell, the chart includes two replicates of data. Data represent relative infection efficiency.

[0099] FIG. 40 is a listing of nucleic acid sequences and amino acid sequences corresponding to publicly available sequence accession numbers, certain of which sequences and/or sequence accession numbers are included and/or utilized, in whole and/or in part, in the present disclosure, and/or certain of which sequences and/or sequence accession numbers are included herein as references.

### DETAILED DESCRIPTION

[0100] The present disclosure provides methods and compositions that include adenoviral vectors advantageous for gene therapy targeting HSCs. Methods and compositions of the present disclosure are based at least in part on the observation that adenoviral vectors of serotypes 3, 7, 11, 14, 16, 21, 34, 37, and 50 demonstrate certain advantageous properties for gene therapy targeting HSCs, at least as compared to one or more reference adenoviral vectors (e.g., an Ad5 vector or an Ad5/35 vector). Adenovirus (or, interchangeably, “adenoviral”) vectors include virus particles characterized by one or more adenoviral protein sequences and optionally include an adenoviral genome. Adenoviral genomes include nucleic acid sequences that include adenoviral sequences sufficient to (a) support packaging of the nucleic acid sequence (including conditional packaging) into an adenoviral vector and to (b) express a coding sequence. Adenoviral genomes can be linear, double-stranded DNA sequences and/or molecules. As those of skill in the art will appreciate, a linear genome such as an adenoviral genome can be present in a circular plasmid, e.g., for viral production purposes. Natural adenoviral genomes range from 26 kb to 45 kb in length, depending on the serotype.

[0101] The present disclosure includes methods and compositions that include engineered adenoviral vectors and adenoviral genomes. Adenoviral vectors include engineered adenoviral vectors that include an engineered adenoviral protein or engineered adenoviral genome. Engineered adenoviral genomes can be engineered to add or remove adenoviral genome sequences, e.g., as compared to a reference sequence.

[0102] Among adenoviruses, there are 57 known human serotypes. One in particular, Adenovirus serotype 5 (Ad5), has historically been widely used in gene therapy research and adenoviral vector constructs. Certain research has been conducted using HDAd5/35 vectors that include Ad5 capsid proteins except that the fibers are chimeric in that they include an Ad5 fiber tail, an Ad35 fiber shaft, and an Ad35 fiber knob (see, e.g., Shayakhmetov et al. 2000 J. Virol 74(6):2567-2583), optionally wherein the Ad35 fiber knob is mutated for increased affinity to CD46 (e.g., Ad5/35++). In particular embodiments, an Ad5/35++ vector is a chimeric Ad5/35 vector with a mutant Ad35++ fiber knob (see, e.g., Wang et al. 2008 J. Virol. 82(21):10567-79, which is incorporated herein by reference in its entirety and particularly with respect to fiber knob mutations). In various embodiments, an Ad35++ mutant fiber knob is an Ad35 fiber knob mutated to increase the affinity to CD46, e.g., by 25-fold, e.g., such that the Ad35++ mutant fiber knob increases cell transduction efficiency, e.g., at lower multiplicity of infection (MOI) (Li and Lieber, FEBS Letters, 593(24): 3623-3648, 2019). In certain embodiments, an adenoviral vector is a chimeric “F35” vector in which all proteins are Ad5 proteins except that the fibers are chimeric in that they include an Ad5 fiber tail, Ad35 fiber shaft, and an Ad35 fiber knob (e.g., as described in Shayakhmetov 2000 J Virol. 74(6): 2567-2583), where the Ad35 fiber knob is a mutant Ad35 fiber knob including mutations D207G and T245A causing increased affinity to CD46 (see, e.g., Wang 2008 J Virol. 82(21):10567-79), and optionally where the genome encoding the Ad5/35 vector includes an E1 deletion. The majority of humans, however, have neutralizing serum antibodies directed against Ad5 capsid proteins, which can block in vivo transduction with adenoviral vectors that include an Ad5 capsid, such as HDAd5/35 vectors. While the existence of neutralizing serum antibodies directed against Ad5 capsid proteins does not negate the therapeutic value of adenoviral vectors that include Ad5 capsids, adenoviral vectors that do not include Ad5 capsids would provide an additional benefit. At least one reason for this benefit is that Ad5 vectors can cause a clinically significant immune response in subjects that have serum antibodies directed against Ad5 capsid proteins (see, e.g., Somanathan et al. 2020 Mol. Ther. 28(3): 784-793), where serotypes without Ad5 capsid proteins may be less likely to cause such an immune response. At least a second reason is that neutralizing serum antibodies directed against Ad5 capsid proteins can reduce therapeutic efficacy of an Ad5 gene therapy vector by inactivating vector particles, where serotypes without Ad5 capsid proteins may be less likely to be inactivated.

[0103] The present disclosure includes adenoviral serotypes that demonstrate infection of target HSCs, including in various embodiments increased infection of HSCs as compared to reference adenoviral serotypes, e.g., Ad5 and/or Ad5/35, and are therefore useful for the production of adenoviral vectors for transduction of HSCs. Methods and compositions of the present disclosure included adenoviral vectors of serotypes 3, 7, 11, 14, 16, 21, 34, 37, and 50.

### I. Gene Therapy Vectors

### 1(A). Adenoviral Vectors

[0104] The present disclosure includes adenoviral vectors and adenoviral genomes useful in gene therapy. Adenoviruses are large, icosahedral-shaped, non-enveloped viruses. Natural adenoviral capsids include three types of proteins: fiber, penton, and hexon. The hexon makes up the majority of the viral capsid, forming 20 triangular faces. A penton base is located at each of the 12 vertices of the capsid, and a fiber (also referred to as knobbed fiber) protrudes from each penton base. Penton and fiber, and in particular the fiber knob, are of particular importance in receptor binding and internalization as they facilitate the attachment of the capsid to host cells.

[0105] Adenoviral genomes include Adenoviral DNA flanked on both ends by serotype-specific inverted terminal repeats (ITRs), which are understood to be cis elements that contribute to or are necessary for viral genome replication and packaging. Depending on the serotype, ITRs can be approximately 100-200 base pairs (e.g., about 160 base pairs) in length, with highest conservation at nucleotide positions (e.g., −50 base pairs) closest to the adenoviral genome terminii. Adenoviral genomes also include a packaging sequence (e.g., a conditional or non-conditional packaging sequence), which can facilitate packaging of the viral genome into viral vectors. Packaging sequences are located in the left portion of the genome.

[0106] Natural adenoviral genomes encode several proteins including early transcriptional units, E1, E2, E3, and E4 and late transcriptional units which encode structural protein components of the adenoviral vector. Early (E) and late (L) transcription are divided by the onset of viral genome replication. The E1 region (E1A and E1B) encodes proteins responsible for the regulation of transcription of the viral genome. The expression of the E2 region (E2A and E2B) results in the synthesis of the proteins for viral genome replication. These proteins are involved in DNA replication, late gene expression, and host cell shut-off. The products of the late genes, including the majority of the viral capsid proteins, are expressed only after significant processing of a single primary transcript issued by the major late promoter (MLP). The MLP is particularly efficient during the late phase of infection. mRNAs transcribed using this promoter can include a 5′-tripartite leader (TPL) sequence that facilitates translation.

### 1(B). Ad3, 7, 11, 14, 16, 21, 34, 37, and 50 Gene Therapy Vectors

[0107] The present disclosure includes Ad3, 7, 11, 14, 16, 21, 34, 37, or 50 genomes. In various embodiments, an Ad3, 7, 11, 14, 16, 21, 34, 37, or 50 genome is a single-stranded or double-stranded DNA sequence that includes ITRs of an Ad3, 7, 11, 14, 16, 21, 34, 37, or 50 vector (e.g., a 5′ ITR according to SEQ ID NO: 1, 17, 33, 49, 65, 81, 97, 113, or 129 and a 3′ ITR according to SEQ ID NO: 2, 18, 34, 50, 66, 82, 98, 114, or 130), or ITRs that individually and/or together have at least 75% sequence identity (e.g., at least 75%, 80%, 85%, 90%, 95%, 96%, 97%, 98%, 99%, or 100% identity) thereto. In various embodiments, an Ad3, 7, 11, 14, 16, 21, 34, 37, or 50 genome is a single-stranded or double-stranded DNA sequence that includes a packaging sequence of an Ad3, 7, 11, 14, 16, 21, 34, 37, or 50 vector (e.g., a packaging sequence according to SEQ ID NO: 3, 19, 35, 51, 67, 83, 99, 115, or 131), or a packaging sequence having at least 75% sequence identity (e.g., at least 75%, 80%, 85%, 90%, 95%, 96%, 97%, 98%, 99%, or 100% identity) thereto. In various embodiments, an Ad3, 7, 11, 14, 16, 21, 34, 37, or 50 genome is a single-stranded or double-stranded DNA sequence that includes a sequence with at least 75% sequence identity (e.g., at least 75%, 80%, 85%, 90%, 95%, 96%, 97%, 98%, 99%, or 100% identity) to all, a portion of, or a contiguous corresponding portion of, or a discontiguous corresponding portion of a reference Ad3, 7, 11, 14, 16, 21, 34, 37, or 50 genome (e.g., SEQ ID NO: 145, 146, 147, 148, 149, 150, 151, 152, or 153).

[0108] In various embodiments, an Ad3, 7, 11, 14, 16, 21, 34, 37, or 50 genome is any nucleotide sequence that includes at least ITRs of an Ad3, 7, 11, 14, 16, 21, 34, 37, or 50 vector (e.g., a 5′ ITR according to SEQ ID NO: 1, 17, 33, 49, 65, 81, 97, 113, or 129 and a 3′ ITR according to SEQ ID NO: 2, 18, 34, 50, 66, 82, 98, 114, or 130), or ITRs that individually and/or together have at least 75% sequence identity (e.g., at least 75%, 80%, 85%, 90%, 95%, 96%, 97%, 98%, 99%, or 100% identity) thereto. In various embodiments, an Ad3, 7, 11, 14, 16, 21, 34, 37, or 50 genome is an Ad3, 7, 11, 14, 16, 21, 34, 37, or 50 genome from which one or more nucleotides, coding sequences, and/or genes are completely or partially deleted as compared to a reference sequence. For example, in some embodiments, an Ad3, 7, 11, 14, 16, 21, 34, 37, or 50 genome can be a genome that does not include one or more of E1, E2, E3, and E4. In certain embodiments, an Ad3, 7, 11, 14, 16, 21, 34, 37, or 50 genome is a genome that does not include any coding sequences of an Ad3, 7, 11, 14, 16, 21, 34, 37, or 50 genome (e.g., a “gutless” vector that includes ITRs having at least 75% sequence identity to Ad3, 7, 11, 14, 16, 21, 34, 37, or 50 genome ITRs but includes none of the coding sequences present in a reference Ad3, 7, 11, 14, 16, 21, 34, 37, or 50 genome).

[0109] In various embodiments, an Ad3, 7, 11, 14, 16, 21, 34, 37, or 50 genome includes, does not include, or includes a deletion of, all or a portion of an E1 sequence according to SEQ ID NO: 4, 20, 36, 52, 68, 84, 100, 116, or 132, or a sequence having at least 75% sequence identity (e.g., at least 75%, 80%, 85%, 90%, 95%, 96%, 97%, 98%, 99%, or 100% identity) thereto.

[0110] In various embodiments, an Ad3, 7, 11, 14, 16, 21, 34, 37, or 50 genome includes, does not include, or includes a deletion of, all or a portion of an E2 sequence according to SEQ ID NO: 5, 21, 37, 53, 69, 85, 101, 117, or 133, or a sequence having at least 75% sequence identity (e.g., at least 75%, 80%, 85%, 90%, 95%, 96%, 97%, 98%, 99%, or 100% identity) thereto.

[0111] In various embodiments, an Ad3, 7, 11, 14, 16, 21, 34, 37, or 50 genome includes, does not include, or includes a deletion of, all or a portion of an E3 sequence according to SEQ ID NO: 4 6, 22, 38, 54, 70, 86, 102, 118, or 134, or a sequence having at least 75% sequence identity (e.g., at least 75%, 80%, 85%, 90%, 95%, 96%, 97%, 98%, 99%, or 100% identity) thereto.

[0112] In various embodiments, an Ad3, 7, 11, 14, 16, 21, 34, 37, or 50 genome includes, or does not include, a sequence that encodes a fiber, wherein the sequence has at least 75% sequence identity (e.g., at least 75%, 80%, 85%, 90%, 95%, 96%, 97%, 98%, 99%, or 100% identity) to SEQ ID NO: 7, 23, 39, 55, 71, 87, 103, 119, or 135.

[0113] In various embodiments, an Ad3, 7, 11, 14, 16, 21, 34, 37, or 50 genome includes, or does not include, a sequence that encodes a fiber shaft, wherein the sequence has at least 75% sequence identity (e.g., at least 75%, 80%, 85%, 90%, 95%, 96%, 97%, 98%, 99%, or 100% identity) to SEQ ID NO: 8, 24, 40, 56, 72, 88, 104, 120, or 136.

[0114] In various embodiments, an Ad3, 7, 11, 14, 16, 21, 34, 37, or 50 genome includes, or does not include, a sequence that encodes a fiber knob, wherein the sequence has at least 75% sequence identity (e.g., at least 75%, 80%, 85%, 90%, 95%, 96%, 97%, 98%, 99%, or 100% identity) to SEQ ID NO: 9, 25, 41, 57, 73, 89, 105, 121, or 137.

[0115] In various embodiments, an Ad3, 7, 11, 14, 16, 21, 34, 37, or 50 genome includes, or does not include, a sequence that encodes a fiber tail, wherein the sequence has at least 75% sequence identity (e.g., at least 75%, 80%, 85%, 90%, 95%, 96%, 97%, 98%, 99%, or 100% identity) to a fiber tail of SEQ ID NO: 7, 23, 39, 55, 71, 87, 103, 119, or 135 (e.g., to the portion of the fiber sequence that includes all nucleotides 5′ of the sequence encoding the fiber shaft and/or that includes all nucleotides encoding the portion of the fiber N-terminal to the fiber shaft).

[0116] In various embodiments, an Ad3, 7, 11, 14, 16, 21, 34, 37, or 50 genome includes, or does not include, a sequence that encodes a penton, wherein the sequence has at least 75% sequence identity (e.g., at least 75%, 80%, 85%, 90%, 95%, 96%, 97%, 98%, 99%, or 100% identity) to SEQ ID NO: 10, 26, 42, 58, 74, 90, 106, 122, or 138.

[0117] In various embodiments, an Ad3, 7, 11, 14, 16, 21, 34, 37, or 50 genome includes, or does not include, a sequence that encodes a hexon, wherein the sequence has at least 75% sequence identity (e.g., at least 75%, 80%, 85%, 90%, 95%, 96%, 97%, 98%, 99%, or 100% identity) to SEQ ID NO: 11, 27, 43, 59, 75, 91, 107, 123, or 139.

[0118] The present disclosure includes Ad3, 7, 11, 14, 16, 21, 34, 37, or 50 vectors that include a fiber having at least 75% sequence identity (e.g., at least 75%, 80%, 85%, 90%, 95%, 96%, 97%, 98%, 99%, or 100% identity) to an Ad3, 7, 11, 14, 16, 21, 34, 37, or 50 fiber (e.g., a fiber according to SEQ ID NO: 12, 28, 44, 60, 76, 92, 108, 124, or 140).

[0119] The present disclosure includes Ad3, 7, 11, 14, 16, 21, 34, 37, or 50 vectors that include a fiber tail having at least 75% sequence identity (e.g., at least 75%, 80%, 85%, 90%, 95%, 96%, 97%, 98%, 99%, or 100% identity) to an Ad3, 7, 11, 14, 16, 21, 34, 37, or 50 fiber tail (e.g., a fiber tail of a fiber according to SEQ ID NO: 12, 28, 44, 60, 76, 92, 108, 124, or 140, e.g., where the fiber tail is the portion of the fiber including all amino acids N-terminal to the fiber shaft).

[0120] The present disclosure includes Ad3, 7, 11, 14, 16, 21, 34, 37, or 50 vectors that include a fiber shaft having at least 75% sequence identity (e.g., at least 75%, 80%, 85%, 90%, 95%, 96%, 97%, 98%, 99%, or 100% identity) to an Ad3, 7, 11, 14, 16, 21, 34, 37, or 50 fiber shaft (e.g., a fiber shaft according to SEQ ID NO: 13, 29, 45, 61, 77, 93, 109, 125, or 141).

[0121] The present disclosure includes Ad3, 7, 11, 14, 16, 21, 34, 37, or 50 vectors that include a fiber knob having at least 75% sequence identity (e.g., at least 75%, 80%, 85%, 90%, 95%, 96%, 97%, 98%, 99%, or 100% identity) to an Ad3, 7, 11, 14, 16, 21, 34, 37, or 50 fiber knob (e.g., a fiber knob according to SEQ ID NO: 14, 30, 46, 62, 78, 94, 110, 126, or 142).

[0122] The present disclosure includes Ad3, 7, 11, 14, 16, 21, 34, 37, or 50 vectors that include a penton having at least 75% sequence identity (e.g., at least 75%, 80%, 85%, 90%, 95%, 96%, 97%, 98%, 99%, or 100% identity) to an Ad3, 7, 11, 14, 16, 21, 34, 37, or 50 penton (e.g., a penton according to SEQ ID NO: 15, 31, 47, 63, 79, 95, 111, 127, or 143).

[0123] The present disclosure includes Ad3, 7, 11, 14, 16, 21, 34, 37, or 50 vectors that include a hexon having at least 75% sequence identity (e.g., at least 75%, 80%, 85%, 90%, 95%, 96%, 97%, 98%, 99%, or 100% identity) to an Ad3, 7, 11, 14, 16, 21, 34, 37, or 50 hexon (e.g., a hexon according to SEQ ID NO: 16, 32, 48, 64, 80, 96, 112, 128, or 144).

[0124] In various embodiments, an Ad3, 7, 11, 14, 16, 21, 34, 37, or 50 vector is any adenoviral vector that includes at least a fiber having at least 75% sequence identity (e.g., at least 75%, 80%, 85%, 90%, 95%, 96%, 97%, 98%, 99%, or 100% identity) to an Ad3, 7, 11, 14, 16, 21, 34, 37, or 50 fiber (e.g., a fiber according to SEQ ID NO: 12, 28, 44, 60, 76, 92, 108, 124, or 140).

[0125] In various embodiments, an Ad3, 7, 11, 14, 16, 21, 34, 37, or 50 vector is any adenoviral vector that includes at least a fiber tail having at least 75% sequence identity (e.g., at least 75%, 80%, 85%, 90%, 95%, 96%, 97%, 98%, 99%, or 100% identity) to an Ad3, 7, 11, 14, 16, 21, 34, 37, or 50 fiber tail (e.g., a fiber tail of a fiber according to SEQ ID NO: 12, 28, 44, 60, 76, 92, 108, 124, or 140, e.g., where the fiber tail is the portion of the fiber including all amino acids N-terminal to the fiber shaft).

[0126] In various embodiments, an Ad3, 7, 11, 14, 16, 21, 34, 37, or 50 vector is any adenoviral vector that includes at least a fiber shaft having at least 75% sequence identity (e.g., at least 75%, 80%, 85%, 90%, 95%, 96%, 97%, 98%, 99%, or 100% identity) to an Ad3, 7, 11, 14, 16, 21, 34, 37, or 50 fiber shaft (e.g., a fiber shaft according to SEQ ID NO: 13, 29, 45, 61, 77, 93, 109, 125, or 141).

[0127] In various embodiments, an Ad3, 7, 11, 14, 16, 21, 34, 37, or 50 vector is any adenoviral vector that includes at least a fiber knob having at least 75% sequence identity (e.g., at least 75%, 80%, 85%, 90%, 95%, 96%, 97%, 98%, 99%, or 100% identity) to an Ad3, 7, 11, 14, 16, 21, 34, 37, or 50 fiber knob (e.g., a fiber knob according to SEQ ID NO: 14, 30, 46, 62, 78, 94, 110, 126, or 142).

[0128] In various embodiments, an Ad3, 7, 11, 14, 16, 21, 34, 37, or 50 vector is any adenoviral vector that includes at least a penton having at least 75% sequence identity (e.g., at least 75%, 80%, 85%, 90%, 95%, 96%, 97%, 98%, 99%, or 100% identity) to an Ad3, 7, 11, 14, 16, 21, 34, 37, or 50 penton (e.g., a penton according to SEQ ID NO: 15, 31, 47, 63, 79, 95, 111, 127, or 143).

[0129] In various embodiments, an Ad3, 7, 11, 14, 16, 21, 34, 37, or 50 vector is any adenoviral vector that includes at least a hexon having at least 75% sequence identity (e.g., at least 75%, 80%, 85%, 90%, 95%, 96%, 97%, 98%, 99%, or 100% identity) to an Ad3, 7, 11, 14, 16, 21, 34, 37, or 50 hexon (e.g., a hexon according to SEQ ID NO: 16, 32, 48, 64, 80, 96, 112, 128, 144).

[0130] Thus, an Ad3, 7, 11, 14, 16, 21, 34, 37, or 50 vector can be a chimeric adenoviral vector that includes at least a fiber knob having at least 75% sequence identity (e.g., at least 75%, 80%, 85%, 90%, 95%, 96%, 97%, 98%, 99%, or 100% identity) to an Ad3, 7, 11, 14, 16, 21, 34, 37, or 50 fiber knob and at least one protein or portion thereof (such as a fiber shaft, fiber tail, penton, or hexon) that has at least 75% sequence identity (e.g., at least 75%, 80%, 85%, 90%, 95%, 96%, 97%, 98%, 99%, or 100% identity) to a different adenoviral serotype.

[0131] An Ad3, 7, 11, 14, 16, 21, 34, 37, or 50 vector can be a chimeric adenoviral vector that includes at least a fiber shaft having at least 75% sequence identity (e.g., at least 75%, 80%, 85%, 90%, 95%, 96%, 97%, 98%, 99%, or 100% identity) to an Ad3, 7, 11, 14, 16, 21, 34, 37, or 50 fiber shaft and at least one protein or portion thereof (such as a fiber knob, fiber tail, penton, or hexon) that has at least 75% sequence identity (e.g., at least 75%, 80%, 85%, 90%, 95%, 96%, 97%, 98%, 99%, or 100% identity) to a different adenoviral serotype.

[0132] An Ad3, 7, 11, 14, 16, 21, 34, 37, or 50 vector can be a chimeric adenoviral vector that includes at least a fiber tail having at least 75% sequence identity (e.g., at least 75%, 80%, 85%, 90%, 95%, 96%, 97%, 98%, 99%, or 100% identity) to an Ad3, 7, 11, 14, 16, 21, 34, 37, or 50 fiber tail and at least one protein or portion thereof (such as a fiber knob, fiber shaft, penton, or hexon) that has at least 75% sequence identity (e.g., at least 75%, 80%, 85%, 90%, 95%, 96%, 97%, 98%, 99%, or 100% identity) to a different adenoviral serotype.

[0133] An Ad3, 7, 11, 14, 16, 21, 34, 37, or 50 vector can be a chimeric adenoviral vector that includes at least a penton having at least 75% sequence identity (e.g., at least 75%, 80%, 85%, 90%, 95%, 96%, 97%, 98%, 99%, or 100% identity) to an Ad3, 7, 11, 14, 16, 21, 34, 37, or 50 penton and at least one protein or portion thereof (such as a fiber knob, fiber shaft, fiber tail, or hexon) that has at least 75% sequence identity (e.g., at least 75%, 80%, 85%, 90%, 95%, 96%, 97%, 98%, 99%, or 100% identity) to a different adenoviral serotype.

[0134] An Ad3, 7, 11, 14, 16, 21, 34, 37, or 50 vector can be a chimeric adenoviral vector that includes at least a hexon having at least 75% sequence identity (e.g., at least 75%, 80%, 85%, 90%, 95%, 96%, 97%, 98%, 99%, or 100% identity) to an Ad3, 7, 11, 14, 16, 21, 34, 37, or 50 hexon and at least one protein or portion thereof (such as a fiber knob, fiber shaft, fiber tail, or penton) that has at least 75% sequence identity (e.g., at least 75%, 80%, 85%, 90%, 95%, 96%, 97%, 98%, 99%, or 100% identity) to a different adenoviral serotype.

[0135] Exemplary sequences of Ad3, 7, 11, 14, 16, 21, 34, 37, or 50 components (e.g., ITRs, packaging sequences, genes, and proteins) are provided in the following tables. Viral polypeptides include proteins that are components of viral vectors and portions or fragments thereof, including for example a fiber, fiber knob, fiber shaft, fiber tail, penton, or hexon.

[0136] Various sequences corresponding to accession numbers disclosed herein, including e.g., accession sequences referred to herein as SEQ ID NOs: 145, 146, 147, 148, 149, 150, 151, 152, and/or 153 as indicated in Tables 1-18, are provided herein in FIG. 40. Those of skill in the art will appreciate that such sequences, including sequences disclosed in FIG. 40, can be referenced in whole (e.g., by an accession number), or in part (e.g., by reference to a nucleotide position and/or a set or range of nucleotide positions of a sequence and/or accession number).

TABLE 1
Ad3 Genomic Sequences
Ad3 Genomic Sequences
Reference Ad3 Genome Sequence: GenBank
accession no. NC_011203 (SEQ ID NO: 145)

| | Exemplary Sequence | |
|---|---|---|
| Component | (position in reference) | SEQ ID NO: |
| Ad3 5′ (left) ITR | 1-136 | 1 |
| Ad3 3′ (right) ITR | 35208-35343 | 2 |
| Ad3 Packaging | 137-479 | 3 |
| Sequence | | |
| Ad3 E1 | 480-3918 | 4 |
| Ad3 E2 | 26643-3947 | 5 |
| Ad3 E3 | 27085-31186 | 6 |
| Ad3 fiber | 31368-32327 | 7 |
| Ad3 fiber tail | 31368-31493 | 166 |
| Ad3 fiber shaft | 31494-31763 | 8 |
| Ad3 fiber knob | 31764-32324 | 9 |
| Ad3 penton | 13905-15539 | 10 |
| Ad3 hexon | 18418-21252 | 11 |

TABLE 2
Ad3 Amino Acid Sequences
Ad3 Amino Acid Sequences

| | Exemplary Sequence | SEQ ID |
|---|---|---|
| Component | (position in reference) | NO: |
| Ad3 fiber | 1-319 (GenBank accession no. YP_002213796) | 12 |
| Ad3 fiber shaft | 43-132 (GenBank accession no. YP_002213796) | 13 |
| Ad3 fiber knob | 134-319 (GenBank accession no. YP_002213796) | 14 |
| Ad3 penton | 1-544 (GenBank accession no. YP_002213774) | 15 |
| Ad3 hexon | 1-944 (GenBank accession no. YP_002213779) | 16 |
| Ad3 fiber tail | 1-42 (GenBank accession no. YP_002213796) | 157 |

TABLE 3
Ad7 Genomic Sequences
Ad7 Genomic Sequences
Reference Ad7 Genome Sequence: GenBank accession
number AC_000018 (SEQ ID NO: 146)

| | Exemplary Sequence | SEQ ID |
|---|---|---|
| Component | (position in reference) | NO: |
| Ad7 5′ (left) ITR | 1-136 | 17 |
| Ad7 3′ (right) ITR | 35379-35514 | 18 |
| Ad7 Packaging | 137-479 | 19 |
| Sequence | | |
| Ad7 E1 | 480-3919 | 20 |
| Ad7 E2 | 26867-3947 | 21 |
| Ad7 E3 | 27308-31345 | 22 |
| Ad7 fiber | 31529-32506 | 23 |
| Ad7 fiber tail | 31529 -31654 | 167 |
| Ad7 fiber shaft | 31655-31927 | 24 |
| Ad7 fiber knob | 31928-32503 | 25 |
| Ad7 penton | 14153-15787 | 26 |
| Ad7 hexon | 18666-21470 | 27 |

TABLE 4
Ad7 Amino Acid Sequences
Ad7 Amino Acid Sequences

| | Exemplary Sequence | SEQ ID |
|---|---|---|
| Component | (position in reference) | NO: |
| Ad7 fiber | 1-325 (GenBank accession - AP_000564) | 28 |
| Ad7 fiber shaft | 43-133 (GenBank accession no. AP_000564) | 29 |
| Ad7 fiber knob | 134-325 (GenBank accession no. AP_000564) | 30 |
| Ad7 penton | 1-544 (GenBank accession no. AP_000543) | 31 |
| Ad7 hexon | 1-934 (GenBank accession no. AP_000548) | 32 |
| Ad7 fiber tail | 1-42 (GenBank accession - AP_000564) | 158 |

TABLE 5
Ad11 Genomic Sequences
Ad11 Genomic Sequences
Reference Ad11 Genome Sequence: GenBank accession
number NC_011202 (SEQ ID NO: 147)

| | Exemplary Sequence | SEQ ID |
|---|---|---|
| Component | (position in reference) | NO: |
| Ad11 5′ (left) ITR | 1-137 | 33 |
| Ad11 3′ (right) ITR | 34658-34794 | 34 |
| Ad11 Packaging | 138-479 | 35 |
| Sequence | | |
| Ad11 E1 | 480-3931 | 36 |
| Ad11 E2 | 25445-3963 | 37 |
| Ad11 E3 | 26866-30624 | 38 |
| Ad11 fiber | 30811-31788 | 39 |
| Ad11 fiber tail | 30811-30936 | 168 |
| Ad11 fiber shaft | 30937-31209 | 40 |
| Ad11 fiber knob | 31210-31785 | 41 |
| Ad11 penton | 13682-15367 | 42 |
| Ad11 hexon | 18254-21100 | 43 |

TABLE 6
Ad11 Amino Acid Sequences
Ad11 Amino Acid Sequences

| | Exemplary Sequence | SEQ ID |
|---|---|---|
| Component | (position in reference) | NO: |
| Ad11 fiber | 1-325 (GenBank accession no. YP_002213828) | 44 |
| Ad11 fiber shaft | 43-133 (GenBank accession no. YP_002213828) | 45 |
| Ad11 fiber knob | 134-325 (GenBank accession no. YP_002213828) | 46 |
| Ad11 penton | 1-561 (GenBank accession no. YP_002213807) | 47 |
| Ad11 hexon | 1-948 (GenBank accession no. YP_002213812) | 48 |
| Ad11 fiber tail | 1-42 (GenBank accession no. YP_002213828) | 159 |

TABLE 7
Ad14 Genomic Sequences
Ad14 Genomic Sequences
Reference Ad14 Genome Sequence: GenBank accession
number AY803294 (SEQ ID NO: 148)

| | Exemplary Sequence | SEQ ID |
|---|---|---|
| Component | (position in reference) | NO: |
| Ad14 5′ (left) ITR | 1-137 | 49 |
| Ad14 3′ (right) ITR | 34628-34764 | 50 |
| Ad14 Packaging | 138-479 | 51 |
| Sequence | | |
| Ad14 E1 | 480-3947 | 52 |
| Ad14 E2 | 23389-3963 | 53 |
| Ad14 E3 | 26854-30601 | 54 |
| Ad14 fiber | 30788-31765 | 55 |
| Ad14 fiber tail | 30788-30913 | 169 |
| Ad14 fiber shaft | 30914-31186 | 56 |
| Ad14 fiber knob | 31187-31762 | 57 |
| Ad14 penton | 13698-15374 | 58 |
| Ad14 hexon | 18252-21089 | 59 |

TABLE 8
Ad14 Amino Acid Sequences
Ad14 Amino Acid Sequences

| | | SEQ |
|---|---|---|
| | Exemplary Sequence | ID |
| Component | (position in reference) | NO: |
| Ad14 fiber | 1-325 (GenBank accession no. AAW33140) | 60 |
| Ad14 fiber shaft | 43-133 (GenBank accession no. AAW33140) | 61 |
| Ad14 fiber knob | 134-325 (GenBank accession no. AAW33140) | 62 |
| Ad14 penton | 1-558 (GenBank accession no. AAW33119) | 63 |
| Ad14 hexon | 1-945 (GenBank accession no. AAW33124) | 64 |
| Ad14 fiber tail | 1-42 (GenBank accession no. AAW33140) | 160 |

TABLE 9
Ad16 Genomic Sequences
Ad16 Genomic Sequences
Reference Ad16 Genome Sequence: GenBank accession
number AY601636 (SEQ ID NO: 149)

| | Exemplary Sequence | SEQ ID |
|---|---|---|
| Component | (position in reference) | NO: |
| Ad16 5′ (left) ITR | 1-114 | 65 |
| Ad16 3′ (right) ITR | 35409-35522 | 66 |
| Ad16 Packaging | 115-479 | 67 |
| Sequence | | |
| Ad16 E1 | 480-3910 | 68 |
| Ad16 E2 | 23580-3954 | 69 |
| Ad16 E3 | 27107-31263 | 70 |
| Ad16 fiber | 31448-32509 | 71 |
| Ad16 fiber tail | 31448-31573 | 170 |
| Ad16 fiber shaft | 31574-31933 | 72 |
| Ad16 fiber knob | 31934-32506 | 73 |
| Ad16 penton | 13902-17534 | 74 |
| Ad16 hexon | 18450-21272 | 75 |

TABLE 10
Ad16 Amino Acid Sequences
Ad16 Amino Acid Sequences

| | | SEQ |
|---|---|---|
| | Exemplary Sequence | ID |
| Component | (position in reference) | NO: |
| Ad16 fiber | 1-353 (GenBank accession no. AAW33461) | 76 |
| Ad16 fiber shaft | 43-172 (GenBank accession no. AAW33461) | 77 |
| Ad16 fiber knob | 173-353 (GenBank accession no. AAW33461) | 78 |
| Ad16 penton | 1-555 (GenBank accession no. AAW33439) | 79 |
| Ad16 hexon | 1-940 (GenBank accession no. AAW33444) | 80 |
| Ad16 fiber tail | 1-42 (GenBank accession no. AAW33461) | 161 |

TABLE 11
Ad21 Genomic Sequences
Ad21 Genomic Sequences
Reference Ad21 Genome Sequence: GenBank accession
number AY601633 (SEQ ID NO: 150)

| | Exemplary Sequence | SEQ ID |
|---|---|---|
| Component | (position in reference) | NO: |
| Ad21 5′ (left) ITR | 1-114 | 81 |
| Ad21 3′ (right) ITR | 35269-35382 | 82 |
| Ad21 Packaging | 115-479 | 83 |
| Sequence | | |
| Ad21 E1 | 480-3911 | 84 |
| Ad21 E2 | 23611-3924 | 85 |
| Ad21 E3 | 27441-31208 | 86 |
| Ad21 fiber | 31406-32377 | 87 |
| Ad21 fiber tail | 31406-31531 | 171 |
| Ad21 fiber shaft | 31532-31804 | 88 |
| Ad21 fiber knob | 31805-32374 | 89 |
| Ad21 penton | 13878-15563 | 90 |
| Ad21 hexon | 18454-21303 | 91 |

TABLE 12
Ad21 Amino Acid Sequences
Ad21 Amino Acid Sequences

| | | SEQ |
|---|---|---|
| | Exemplary Sequence | ID |
| Component | (position in reference) | NO: |
| Ad21 fiber | 1-323 (GenBank accession no. AAW33370) | 92 |
| Ad21 fiber shaft | 43-133 (GenBank accession no. AAW33370) | 93 |
| Ad21 fiber knob | 134-323 (GenBank accession no. AAW33370) | 94 |
| Ad21 penton | 1-561 (GenBank accession no. AAW33349) | 95 |
| Ad21 hexon | 1-949 (GenBank accession no. AAW33354) | 96 |
| Ad21 fiber tail | 1-42 (GenBank accession no. AAW33370) | 162 |

TABLE 13
Ad34 Genomic Sequences
Ad34 Genomic Sequences
Reference Ad34 Genome Sequence: GenBank accession
number AY737797 (SEQ ID NO: 151)

| | Exemplary Sequence | SEQ ID |
|---|---|---|
| Component | (position in reference) | NO: |
| Ad34 5′ (left) ITR | 1-137 | 97 |
| Ad34 3′ (right) ITR | 34639-34775 | 98 |
| Ad34 Packaging | 138-479 | 99 |
| Sequence | | |
| Ad34 E1 | 480-3929 | 100 |
| Ad34 E2 | 23399-3945 | 101 |
| Ad34 E3 | 27185-30625 | 102 |
| Ad34 fiber | 30812-31783 | 103 |
| Ad34 fiber tail | 30812-30937 | 172 |
| Ad34 fiber shaft | 30938-31210 | 104 |
| Ad34 fiber knob | 31211-31780 | 105 |
| Ad34 penton | 13681-15357 | 106 |
| Ad34 hexon | 18244-21099 | 107 |

TABLE 14
Ad34 Amino Acid Sequences
Ad34 Amino Acid Sequences

| | | SEQ |
|---|---|---|
| | Exemplary Sequence | ID |
| Component | (position in reference) | NO: |
| Ad34 fiber | 1-323 (GenBank accession no. AAW33501) | 108 |
| Ad34 fiber shaft | 43-133 (GenBank accession no. AAW33501) | 109 |
| Ad34 fiber knob | 134-323 (GenBank accession no. AAW33501) | 110 |
| Ad34 penton | 1-558 (GenBank accession no. ABC49791) | 111 |
| Ad34 hexon | 1-951 (GenBank accession no. AAW33485) | 112 |
| Ad34 fiber tail | 1-42 (GenBank accession no. AAW33501) | 163 |

TABLE 15
Ad37 Genomic Sequences
Ad37 Genomic Sequences
Reference Ad37 Genome Sequence: GenBank accession
number DQ900900 (SEQ ID NO: 152)

| | Exemplary Sequence | SEQ ID |
|---|---|---|
| Component | (position in reference) | NO: |
| Ad37 5′ (left) ITR | 1-159 | 113 |
| Ad37 3′ (right) ITR | 35055-35213 | 114 |
| Ad37 Packaging | 160-479 | 115 |
| Sequence | | |
| Ad37 E1 | 480-3867 | 116 |
| Ad37 E2 | 22777-3902 | 117 |
| Ad37 E3 | 26198-30771 | 118 |
| Ad37 fiber | 31038-32135 | 119 |
| Ad37 fiber tail | 31038-31163 | 173 |
| Ad37 fiber shaft | 31164-31592 | 120 |
| Ad37 fiber knob | 31593-32132 | 121 |
| Ad37 penton | 13530-15089 | 122 |
| Ad37 hexon | 17775-20624 | 123 |

TABLE 16
Ad37 Amino Acid Sequences
Ad37 Amino Acid Sequences

| | | SEQ |
|---|---|---|
| | Exemplary Sequence | ID |
| Component | (position in reference) | NO: |
| Ad37 fiber | 1-361 (GenBank accession no. ABK59080) | 124 |
| Ad37 fiber shaft | 43-185 (GenBank accession no. ABK59080) | 125 |
| Ad37 fiber knob | 186-361 (GenBank accession no. ABK59080) | 126 |
| Ad37 penton | 1-519 (GenBank accession no. ABK59086) | 127 |
| Ad37 hexon | 1-949 (GenBank accession no. ABK59070) | 128 |
| Ad37 fiber tail | 1-42 (GenBank accession no. ABK59080) | 164 |

TABLE 17
Ad50 Genomic Sequences
Ad50 Genomic Sequences
Reference Ad50 Genome Sequence: GenBank accession
number AY737798 (SEQ ID NO: 153)

| | Exemplary Sequence | SEQ ID |
|---|---|---|
| Component | (position in reference) | NO: |
| Ad50 5′ (left) ITR | 1-114 | 129 |
| Ad50 3′ (right) ITR | 35272-35385 | 130 |
| Ad50 Packaging | 115-479 | 131 |
| Sequence | | |
| Ad50 E1 | 480-3910 | 132 |
| Ad50 E2 | 23590-3923 | 133 |
| Ad50 E3 | 27102-31222 | 134 |
| Ad50 fiber | 31409-32380 | 135 |
| Ad50 fiber tail | 31409-31534 | 174 |
| Ad50 fiber shaft | 31535-31807 | 136 |
| Ad50 fiber knob | 31808-32377 | 137 |
| Ad50 penton | 13888-15570 | 138 |
| Ad50 hexon | 18460-21282 | 139 |

TABLE 18
Ad50 Amino Acid Sequences
Ad50 Amino Acid Sequences

| | | SEQ |
|---|---|---|
| | Exemplary Sequence | ID |
| Component | (position in reference) | NO: |
| Ad50 fiber | 1-323 (GenBank accession no. AAW33547) | 140 |
| Ad50 fiber shaft | 43-133 (GenBank accession no. AAW33547) | 141 |
| Ad50 fiber knob | 134-323 (GenBank accession no. AAW33547) | 142 |
| Ad50 penton | 1-560 (GenBank accession No. AAW33525) | 143 |
| Ad50 hexon | 1-940 (GenBank accession no. AAW33530) | 144 |
| Ad50 fiber tail | 1-42 (GenBank accession no. AAW33547) | 165 |

[0137] In various embodiments, an Ad3, 7, 11, 14, 16, 21, 34, 37, or 50 vector or genome includes modifications that reduce and/or eliminate replication of the virus in recipients. Broadly, there are three recognized “generations” of adenoviral vectors and genomes engineered to reduce and/or eliminate replication of the virus in recipients. Adenoviral vectors of the present disclosure can include vectors according to any of these three generations.

[0138] In various embodiments, an Ad3, 7, 11, 14, 16, 21, 34, 37, or 50 genome differs from a reference Ad sequence (e.g., one or more canonical, representative, exemplary, or wild-type sequence of an adenovirus of a serotype of interest) at least in that the regulatory E1 gene (E1a and E1b) is removed from the Ad genome (“first generation” vector modifications). E1a and E1b are the first transcriptional regulatory factors produced during the adenoviral replication cycle. E1 deletion reduces or eliminates expression of certain viral genes controlled by E1, and E1-deleted helper viruses are replication-defective. Thus, first generation Ad vectors are deficient for replication in a recipient. In some embodiments, first-generation adenoviral vectors are engineered to remove E1 and E3 genes. Retained portions of the reference genome can be identical in sequence to a reference genome or can have less than 100% identity with a reference genome, e.g., at least 99%, 98%, 97%, 96%, 95%, 90%, 85%, 80%, or 75% identity. Without these E1 (or E1 and E3) genes, adenoviral vectors cannot replicate on their own but can be produced in mammalian cell lines that express E1 (e.g., of the same serotype) or another protein sufficient to restore expression of the certain viral genes. For illustration, where an E1-deficient Ad5 vector encodes an Ad5 E4orf6, the helper vector can be propagated in a cell line that expresses Ad5 E1. In one exemplary cell type for adenoviral vector production, HEK293 cells express Ad5 E1b55k, which is known to form a complex with Ad5 E4 protein ORF6.

[0139] In various embodiments, an Ad3, 7, 11, 14, 16, 21, 34, 37, or 50 genome differs from a reference Ad sequence at least in that the E1 gene (E1a and E1b) and one or more of non-structural genes E2, E3 and/or E4 are deleted (“second generation” modifications). Second generation Ads have greater payload capacity than first generation Ads and are more deficient for replication than first generation viruses. In some embodiments, second-generation adenoviral vectors, in addition to E1/E3 removal, are engineered to remove non-structural genes E2 and E4, resulting in increased capacity and reduced immunogenicity. Retained portions of the reference genome can be identical in sequence to a reference genome or can have less than 100% identity with a reference genome, e.g., at least 99%, 98%, 97%, 96%, 95%, 90%, 85%, 80%, or 75% identity.

[0140] In various embodiments, an Ad3, 7, 11, 14, 16, 21, 34, 37, or 50 genome differs from a reference Ad sequence at least in that they are engineered to remove all viral coding sequences from the Ad genome, and retain only the ITRs of the genome and the packaging sequence of the genome or a functional fragment thereof (“third generation” modifications). Third generation adenoviral vectors can also be referred to as gutless, high capacity adenoviral vectors, or helper-dependent adenoviral vectors (HdAds). Retained portions of the reference genome can be identical in sequence to a reference genome or can have less than 100% identity with a reference genome, e.g., at least 99%, 98%, 97%, 96%, 95%, 90%, 85%, 80%, or 75% identity.

[0141] Because third generation Ad genomes do not encode the proteins necessary for viral production, they are helper-dependent: a helper-dependent genome can only be packaged into a vector if they are present in a cell that includes a nucleic acid sequence that provides viral proteins in trans. These helper-dependent vectors are also characterized by still greater capacity than first and second generation vectors and decreased immunogenicity. Because HDAd vectors do not express viral genes when used as a vector, the risk of cytotoxicity or interferon response in recipients is reduced.

[0142] Helper-dependent adenoviral vectors (HDAd) engineered to lack all viral coding sequences can efficiently transduce a wide variety of cell types, and can mediate long-term transgene expression with negligible chronic toxicity. By deleting the viral coding sequences and leaving only the cis-acting elements necessary for genome replication (ITRs) and packaging (w), cellular immune response against the Ad vector is reduced. HDAd vectors have a large cloning capacity of up to allowing for the delivery of large payloads. These payloads can include large therapeutic genes or even multiple transgenes and large regulatory components to enhance, prolong, and regulate transgene expression. It has also been observed that the certain HDAd vector genomes can be most efficiently packaged when the genome has at least a minimum a total length, e.g., a minimum to total length of at least 20 kb (e.g., 20, 21, 22, 23, 24, 25, 26, 27, 28, 29, 30, 31, 32, 33, 34, or 35 kb) which length can include, e.g., a therapeutic payload and/or a “stuffer” sequence. Where a payload does not utilize a number of nucleotides that causes the adenoviral genome to have at least a target length, a stuffer sequence can be used to achieve or surpass the target length. The present disclosure includes that a minimum length for efficient packaging is not required for beneficial use of vectors provided herein, such that meeting any target length may be advantageous but not required for use of compositions and methods provided herein. Like other adenoviral vectors, typical HDAd genomes generally remain episomal and do not integrate with a host genome.

[0143] Because HDAd vectors do not encode the viral proteins required to produce viral particles, viral proteins must be provided in trans, e.g., expressed in and/or by cells in which the HDAd genome is present. In some HDAd vector systems, one viral genome (a helper genome) encodes all of the proteins (e.g., all of the structural viral proteins) required for replication but has a conditional defect in the packaging sequence, making it less likely to be packaged into a vector under certain vector production conditions (e.g., in the presence of an agent that reduces function of the conditionally defective packaging sequence). Thus, the HDAd donor viral genome includes (e.g., only includes) Ad ITRs, a payload (e.g., a therapeutic payload), and a functional packaging sequence (e.g., a wild-type packaging sequence or a functional fragment thereof), which allows the HDAd donor viral genome to be selectively packaged into HDAd viral vectors produced from structural components expressed from the helper vector genome. In other words, Ad3, 7, 11, 14, 16, 21, 34, 37, or 50 helper vectors can be used for production of Ad3, 7, 11, 14, 16, 21, 34, 37, or 50 donor vectors. Production of HD Ad3, 7, 11, 14, 16, 21, 34, 37, or 50 vectors can include co-transfection of a plasmid containing the HDAd vector genome and a packaging-defective helper virus that provides structural and non-structural viral proteins. The helper virus genome can rescue propagation of the Ad3, 7, 11, 14, 16, 21, 34, 37, or 50 donor vector and Ad3, 7, 11, 14, 16, 21, 34, 37, or 50 donor vector can be produced, e.g., at a large scale, and isolated. Various protocols are known in the art, e.g., at Palmer et al., 2009 Gene Therapy Protocols. Methods in Molecular Biology, Volume 433. Humana Press; Totowa, NJ: 2009. pp. 33-53. In some embodiments, a helper genome is E1-deficient.

[0144] In some HDAd vector systems, a helper genome utilizes a recombinase system (e.g., a Cre/loxP system) for conditional packaging. In certain such HDAd vector systems, a helper genome can include a packaging sequence or functional fragment thereof (e.g., a fragment of the packaging sequence that is sufficient for packaging, required for packaging, or required for efficient packaging of the Ad genome into the capsid) flanked by recombinase (e.g., loxP) sites so that contact with a corresponding recombinase (e.g., Cre recombinase) excises the packaging sequence or functional fragment thereof from the helper genome by recombinase-mediated (e.g., Cre-mediated) site-specific recombination between the recombinase sites (e.g., loxP sites). The present disclosure includes, among other things, Ad3, 7, 11, 14, 16, 21, 34, 37, or 50 helper vectors and genomes that include two recombination sites that flank a packaging sequence or functional fragment thereof, where the two recombination sites are sites corresponding to (i.e., for, or acted upon by) the same recombinase.

[0145] In various embodiments, a helper genome can include deletion of E1, e.g., where the helper genome includes all of the viral genes except for E1, as E1 expression products can be supplied by complementary expression from the genome of a producer cell line. In some embodiments, to prevent generation of replication competent Ad (RCA) as a consequence of homologous recombination between the helper and HDAd donor genomes present in producer cells, a “stuffer” sequence can be inserted into the E3 region to render any recombinants too large to be packaged and/or efficiently packaged.

[0146] For production of HDAd vectors, an HDAd donor genome can be delivered to cells that express a recombinase for excision of the conditional packaging sequence of a helper vector (e.g., 293 cells (HEK293) that expresses Cre recombinase), optionally where the HDAd donor genome is delivered to the cells in a non-viral vector form, such as a bacterial plasmid form (e.g., where the HDAd donor genome is present in a bacterial plasmid (pHDAd) and/or is liberated by restriction enzyme digestion). The same cells can be transduced with the helper genome including a packaging sequence or functional fragment thereof flanked by recombinase sites (e.g., loxP sites). Thus, producer cells can be transfected with the HDAd donor genome and transduced with a helper genome bearing a packaging sequence or a functional fragment thereof flanked by recombinase sites (e.g., loxP sites), where the cells express a recombinase (e.g., Cre) corresponding to the recombinase sites such that excision of the packaging sequence or functional fragment thereof renders the helper virus genome deficient for packaging (e.g., unpackageable), but still able to provide all of the necessary trans-acting factors for production of HDAd donor vector including the HDAd donor genome.

[0147] Similar HDAd production systems have been developed using FLP (e.g., FLPe)/frt site-specific recombination, where FLP-mediated recombination between frt sites flanking the packaging sequence or functional fragment thereof of the helper genome reduces or eliminates packaging of helper genomes in producer cells that express FLP.

[0148] HDAd vectors including the donor vector genome including the payload can be isolated from the producer cells. HDAd donor vectors can be further purified from helper vectors by physical means. In general, some contamination of helper vectors and/or helper genomes in HDAd viral vectors and HDAd viral vector formulations can occur and can be tolerated.

[0149] HDAd3, 7, 11, 14, 16, 21, 34, 37, and 50 donor vectors, donor genomes, helper vectors, and helper genomes are also exemplary of compositions provided herein and can be used in various methods of the present disclosure. An HDAd3, 7, 11, 14, 16, 21, 34, 37, or 50 vector or genome is a helper-dependent Ad3, 7, 11, 14, 16, 21, 34, 37, or 50 vector or genome. An Ad3, 7, 11, 14, 16, 21, 34, 37, or 50 helper vector is a vector that includes a helper genome that includes a conditionally expressed (e.g., frt-site or loxP-site flanked) packaging sequence or fragment thereof and encodes all of the necessary trans-acting factors for production of Ad3, 7, 11, 14, 16, 21, 34, 37, or 50 virions into which the donor genome can be packaged.

[0150] The present disclosure further includes an HDAd3, 7, 11, 14, 16, 21, 34, 37, or 50 donor vector production system including a cell including an HDAd3, 7, 11, 14, 16, 21, 34, 37, or 50 donor genome and an Ad3, 7, 11, 14, 16, 21, 34, 37, or 50 helper genome. In certain such cells, viral proteins encoded and expressed by the helper genome can be utilized in production of HDAd3, 7, 11, 14, 16, 21, 34, 37, or 50 donor vectors in which the HDAd3, 7, 11, 14, 16, 21, 34, 37, or 50 donor genome is packaged. Accordingly, the present disclosure includes methods of production of HDAd3, 7, 11, 14, 16, 21, 34, 37, or 50 donor vectors by culturing cells that include an HDAd3, 7, 11, 14, 16, 21, 34, 37, or 50 donor genome and an Ad3, 7, 11, 14, 16, 21, 34, 37, or 50 helper genome. In some embodiments the cells encode and express a recombinase that corresponds to recombinase direct repeats that flank a packaging sequence of the Ad3, 7, 11, 14, 16, 21, 34, 37, or 50 helper vector. In some embodiments, the flanked packaging sequence of the Ad3, 7, 11, 14, 16, 21, 34, 37, or 50 helper genome has been excised.

[0151] In some embodiments the Ad3, 7, 11, 14, 16, 21, 34, 37, or 50 helper genome encodes all Ad3, 7, 11, 14, 16, 21, 34, 37, or 50 coding sequences. In some embodiments the Ad3, 7, 11, 14, 16, 21, 34, 37, or 50 helper genome encodes and/or expresses all Ad3, 7, 11, 14, 16, 21, 34, 37, or 50 coding sequences except for one or more coding sequences of E1 and/or an E3 coding sequence and/or an E4 coding sequence. In various embodiments, a helper genome that does not encode and/or express an Ad3, 7, 11, 14, 16, 21, 34, 37, or 50 E1 gene does not encode and/or express an Ad3, 7, 11, 14, 16, 21, 34, 37, or 50 E4 gene. In various embodiments, as will be appreciate by those of skill in the art, cells of compositions and methods for production of HDAd donor vectors can be cells that express an E1 expression product.

[0152] The present disclosure includes, among other things, HDAd3, 7, 11, 14, 16, 21, 34, 37, or 50 donor vectors and genomes that include Ad3, 7, 11, 14, 16, 21, 34, 37, or 50 ITRs (a 5′ Ad3, 7, 11, 14, 16, 21, 34, 37, or 50 ITR and a 3′ ITR of the same serotype), e.g., where two Ad3, 7, 11, 14, 16, 21, 34, 37, or 50 ITRs flank a packaging sequence and a payload. The present disclosure includes, among other things, HDAd3, 7, 11, 14, 16, 21, 34, 37, or 50 donor vectors and genomes in which E1 or a fragment thereof is deleted. The present disclosure includes, among other things, HDAd3, 7, 11, 14, 16, 21, 34, 37, or 50 vectors and genomes in which E3 or a fragment thereof is deleted.

[0153] In various embodiments, excision of a packaging sequence or functional fragment thereof from an Ad3, 7, 11, 14, 16, 21, 34, 37, or 50 helper genome reduces propagation of the vector by, e.g., at least 20%, 30%, 40%, 50%, 60%, 70%, 80%, 90%, 91%, 92%, 93%, 94%, 95%, 96%, 97%, 98%, 99%, 99.5%, 99.9%, or 100% (e.g., reduces propagation of the vector by a percentage having a lower bound of 20%, 30%, 40%, 50%, 60%, 70%, and an upper bound of 60%, 70%, 80%, 90%, 91%, 92%, 93%, 94%, 95%, 96%, 97%, 98%, 99%, 99.5%, 99.9% or 100%), optionally where percent propagation is measured as the number of viral particles produced by propagation of excised vector (vector from which the recombinase site-flanked sequence has been excised) as compared to complete vector (vector from which the recombinase site-flanked sequence has not been excised) or as compared to wild-type Ad3, 7, 11, 14, 16, 21, 34, 37, or 50 vector under comparable conditions.

[0154] An additional optional engineering consideration can be engineering of a helper genome having a size that permits separation of helper vector from HDAd3, 7, 11, 14, 16, 21, 34, 37, or 50 donor vector by centrifugation, e.g., by CsCl ultracentrifugation. One means of achieving this result is to increase the size of the helper genome as compared to a typical Ad3, 7, 11, 14, 16, 21, 34, 37, or 50 genome. In particular, adenoviral genomes can be increased by engineering to at least 104% of wild-type length. Certain helper vectors of the present disclosure can accommodate a payload and/or stuffer sequence.

[0155] The present disclosure includes that in various embodiments a vector or genome of the present disclosure can include a selection of components each selected from, or having at least 75% sequence identity (e.g., at least 75%, 80%, 85%, 90%, 95%, 96%, 97%, 98%, 99%, or 100% identity) to, a corresponding sequence of a single particular serotype. To provide an illustrative example, all components can correspond to (e.g., have at least 75% sequence identity to sequences of) Ad34, excepting sequences otherwise indicated (e.g., a payload, e.g., a heterologous payload).

### I(C). Ad3, 7, 11, 14, 16, 21, 34, 37, and 50 Gene Therapy Vector Payloads

[0156] Ad3, 7, 11, 14, 16, 21, 34, 37, or 50 donor vectors and genomes of the present disclosure can include a variety of heterologous nucleic acid payloads that can include any of one or more coding sequences that encode one or more expression products, one or more regulatory sequences operably linked to a coding sequence, one or more stuffer sequences, and the like. In various embodiments, the payload is engineered in order to achieve a desired result such as a therapeutic effect in a host cell or system, e.g., expression of a protein of therapeutic interest or of expression of a gene editing system, e.g., a CRISPR/Cas system or base editing system, to generate a sequence modification of therapeutic interest.

[0157] In some embodiments, a payload can include a gene. A gene can include not only coding sequences but also regulatory regions such as promoters, enhancers, termination regions, locus control regions (LCRs), termination and polyadenylation signal elements, splicing signal elements, silencers, insulators, and the like. A gene can include introns and other DNA sequences spliced from an expressed mRNA transcript, along with variants resulting from alternative splice sites. Coding sequences can also include alternative synonymous codon usage as compared to a reference sequence, e.g., codon usage modified as compared to a reference in accordance with codon preference of a specific organism or target cell type.

[0158] A payload can include a single gene or multiple genes. A payload can include a single coding sequence or a plurality of coding sequences. A payload can include a single regulatory sequence or a plurality of regulatory sequences. A payload can include a plurality of coding sequences where the individual expression products of the coding sequences function together, e.g., as in the case of an endonuclease and a guide RNA, or independently, e.g., as two separate proteins that do not directly or indirectly bind. As will be appreciated by those of skill in the art, any payload or payload component (e.g., a payload-encoded expression product or regulatory sequence) that is not encoded by the reference wild-type Ad3, 7, 11, 14, 16, 21, 34, 37, or 50 genome can be referred to herein as a heterologous expression product.

[0159] For the avoidance of doubt, the present disclosure includes variants of amino acid and nucleic acid sequences provided herein. Variants include sequences with at least 70% sequence identity, 80% sequence identity, 85% sequence, 90% sequence identity, 95% sequence identity, 96% sequence identity, 97% sequence identity, 98% sequence identity, or 99% sequence identity to the protein and nucleic acid sequences described or disclosed herein wherein the variant exhibits substantially similar or improved biological function.

### I(C)(i). Payload Expression Products

[0160] A payload of an adenoviral donor vector or adenoviral donor genome of the present disclosure can include one or more coding sequences that encode any of a variety of expression products. Exemplary expression products include proteins, including without limitation replacement therapy proteins for treatment of diseases or conditions characterized by low expression or activity of a biologically active protein as compared to a reference level. Exemplary expression products include CRISPR/Cas, base editor, and prime editor systems. Exemplary expression products include antibodies, CARs, and TCRs. Exemplary expression products include small RNAs. In various embodiments, integration of all or a portion of a donor vector payload into a host cell genome is not required in order for delivery to the target cell of a donor vector or genome to produce an intended or target effect, e.g., in certain instances in which the intended or target effect includes editing of the host cell genome by a CRISPR, base editor, or prime editor system. In various embodiments, integration of all or a portion of a donor vector payload is required or preferred in order for delivery to the target cell of a donor vector or genome to produce an intended or target effect, e.g., where expression of a payload-encoded expression product is desired in progeny cells of a transduced target cell. In various embodiments, a payload can include a nucleic acid sequence engineered for integration into a host cell genome (an “integration element”), e.g., by recombination or transposition.

[0161] A gene sequence encoding one or more therapeutic proteins can be readily prepared by synthetic or recombinant methods from the relevant amino acid sequence. In particular embodiments, the gene sequence encoding any of these sequences can also have one or more restriction enzyme sites at the 5′ and/or 3′ ends of the coding sequence in order to provide for easy excision and replacement of the gene sequence encoding the sequence with another gene sequence encoding a different sequence. In particular embodiments, the gene sequence encoding the sequences can be codon optimized for expression in mammalian cells.

[0162] Particular examples of therapeutic genes and/or expression products include γ-globin, Factor VIII, γC, JAK3, IL7RA, RAG1, RAG2, DCLRE1C, PRKDC, LIG4, NHEJ1, CD3D, CD3E, CD3Z, CD3G, PTPRC, ZAP70, LCK, AK2, ADA, PNP, WHN, CHD7, ORAI1, STIM1, CORO1A, CIITA, RFXANK, RFX5, RFXAP, RMRP, DKC1, TERT, TINF2, DCLRE1B, SLC46A1, a FANC family gene (e.g., FancA, FancB, FancC, FancD1 (BRCA2), FancD2, FancE, FancF, FancG, Fancl, FancJ (BRIP1), FancL, FancM, FancN (PALB2), FancO (RAD51C), FancP (SLX4), FancQ (ERCC4), FancR (RAD51), FancS (BRCA1), FancT (UBE2T), FancU (XRCC2), FancV (MAD2L2), and FancW (RFWD3)), soluble CD40, CTLA, Fas L, an antibody (e.g., that specifically binds CD4, CD5, CD7, CD52, IL1, IL2, IL6, TNF, P53, PTPN22, or DRB1*1501/DQB1*0602), an antibody to TCR specifically present on autoreactive T cells, IL4, IL10, IL12, IL13, IL1Ra, sIL1RI, sIL1RII, sTNFRI, sTNFRII, globin family genes, WAS, phox, dystrophin, pyruvate kinase, CLN3, ABCD1, arylsulfatase A, SFTPB, SFTPC, NLX2.1, ABCA3, GATA1, ribosomal protein genes, TERT, TERC, DKC1, TINF2, CFTR, LRRK2, PARK2, PARK7, PINK1, SNCA, PSEN1, PSEN2, APP, SOD1, TDP43, FUS, ubiquilin 2, C9ORF72, and other therapeutic genes and/or expression products described herein.

[0163] A therapeutic gene can be selected to provide a therapeutically effective response against diseases related to red blood cells and clotting. In particular embodiments, the disease is a hemoglobinopathy like thalassemia, or a sickle cell disease/trait. The therapeutic gene may be, for example, a gene that induces or increases production of hemoglobin; induces or increases production of β-globin, γ-globin, or α-globin; or increases the availability of oxygen to cells in the body. The therapeutic gene may be, for example, HBB or CYB5R3. Exemplary effective treatments may, for example, increase blood cell counts, improve blood cell function, or increase oxygenation of cells in patients. In another particular embodiment, the disease is hemophilia. The therapeutic gene may be, for example, a gene that increases the production of coagulation/clotting factor VIII or coagulation/clotting factor IX, causes the production of normal versions of coagulation factor VIII or coagulation factor IX, a gene that reduces the production of antibodies to coagulation/clotting factor VIII or coagulation/clotting factor IX, or a gene that causes the proper formation of blood clots. Exemplary therapeutic genes include F8 and F9. Exemplary effective treatments may, for example, increase or induce the production of coagulation/clotting factors VIII and IX; improve the functioning of coagulation/clotting factors VIII and IX, or reduce clotting time in subjects.

[0164] In various embodiments of the present disclosure, a donor vector encodes a globin gene, wherein the globin protein encoded by the globin gene is selected from a γ-globin, a β-globin, and/or an α-globin. Globin genes of the present disclosure can include, e.g., one or more regulatory sequences such as a promoter operably linked to a nucleic acid sequence encoding a globin protein. As those of skill in the art will appreciate, each of γ-globin, β-globin, and/or α-globin is a component of fetal and/or adult hemoglobin and is therefore useful in various vectors disclosed herein.

[0165] In various embodiments, increasing expression of a globin protein can refer to any of one or more of (i) increasing the amount, concentration, or expression (e.g., transcription or translation of nucleic acids encoding) in a cell or system of globin protein having a particular sequence; (ii) increasing the amount, concentration, or expression (e.g., transcription or translation of nucleic acids encoding) in a cell or system of globin protein of a particular type (e.g., the total amount of all proteins that would be identified as γ-globin (or alternatively β-globin or α-globin) by those of skill in the art or as set forth in the present specification) without respect to the sequences of the proteins relative to each other; and/or (iii) expressing in a cell or system a heterologous globin protein, e.g., a globin protein not encoded by a host cell prior to gene therapy.

[0166] The following references describe particular exemplary sequences of functional globin genes. References 1-4 relate to α-type globin sequences and references 4-12 relate to β-type globin sequences (including β and γ globin sequences), which sequences are hereby incorporated by reference: (1) GenBank Accession No. Z84721 (Mar. 19, 1997); (2) GenBank Accession No. NM 000517 (Oct. 31, 2000); (3) Hardison et al., J. Mol. Biol. (1991) 222(2):233-249; (4) A Syllabus of Human Hemoglobin Variants (1996), by Titus et al., published by The Sickle Cell Anemia Foundation in Augusta, Ga. (available online at globin.cse.psu.edu); (5) GenBank Accession No. J00179 (Aug. 26, 1993) or U01317.1; (6) Tagle et al., Genomics (1992) 13(3):741-760; (7) Grovsfeld et al., Cell (1987) 51(6):975-985; (8) Li et al., Blood (1999) 93(7):2208-2216; (9) Gorman et al., J. Biol. Chem. (2000) 275(46):35914-35919; (10) Slightom et al., Cell (1980) 21(3):627-638; (11) Fritsch et al., Cell (1980) 19(4): 959-972; (12) Marotta et al., J. Biol. Chem. (1977) 252(14):5040-5053. For additional coding and non-coding regions of genes encoding globins see, for example, by Marotta et al., Prog. Nucleic Acid Res. Mol. Biol. 19, 165-175, 1976, Lawn et al., Cell 21 (3), 647-651, 1980, and Sadelain et al., PNAS.; 92:6728-6732, 1995. In some embodiments a globin gene encodes a G16D gamma globin variant.

[0167] An exemplary amino acid sequence of hemoglobin subunit R is provided, for example, at NCBI Accession No. P68871. An exemplary amino acid sequence for β-globin is provided, for example, at NCBI Accession No. NP_000509.

[0168] In addition to therapeutic genes and/or gene products, the transgene can also encode for therapeutic molecules, such as checkpoint inhibitor reagents, chimeric antigen receptor molecules specific to one or more cancer antigens, and/or T-cell receptors specific to one or more cancer antigens.

[0169] As another example, a therapeutic gene can be selected to provide a therapeutically effective response against a lysosomal storage disorder. In particular embodiments, the lysosomal storage disorder is mucopolysaccharidosis (MPS), type I; MPS II or Hunter Syndrome; MPS III or Sanfilippo syndrome; MPS IV or Morquio syndrome; MPS V; MPS VI or Maroteaux-Lamy syndrome; MPS VII or sly syndrome; α-mannosidosis; β-mannosidosis; glycogen storage disease type I, also known as GSDI, von Gierke disease, or Tay Sachs; Pompe disease; Gaucher disease; or Fabry disease. The therapeutic gene may be, for example a gene encoding or inducing production of an enzyme, or that otherwise causes the degradation of mucopolysaccharides in lysosomes. Exemplary therapeutic genes include IDUA or iduronidase, IDS, GNS, HGSNAT, SGSH, NAGLU, GUSB, GALNS, GLB1, ARSB, and HYAL1. Exemplary effective genetic therapies for lysosomal storage disorders may, for example, encode or induce the production of enzymes responsible for the degradation of various substances in lysosomes; reduce, eliminate, prevent, or delay the swelling in various organs, including the head (exp. Macrosephaly), the liver, spleen, tongue, or vocal cords; reduce fluid in the brain; reduce heart valve abnormalities; prevent or dilate narrowing airways and prevent related upper respiratory conditions like infections and sleep apnea; reduce, eliminate, prevent, or delay the destruction of neurons, and/or the associated symptoms.

[0170] As another example, a therapeutic gene can be selected to provide a therapeutically effective response against a hyperproliferative disease. In particular embodiments, the hyperproliferative disease is cancer. The therapeutic gene may be, for example, a tumor suppressor gene, a gene that induces apoptosis, a gene encoding an enzyme, a gene encoding an antibody, or a gene encoding a hormone. Exemplary therapeutic genes and gene products include (in addition to those listed elsewhere herein) 101F6, 123F2 (RASSF1), 53BP2, abl, ABLI, ADP, aFGF, APC, ApoAI, ApoAIV, ApoE, ATM, BAI-1, BDNF, Beta*(BLU), bFGF, BLC1, BLC6, BRCA1, BRCA2, CBFA1, CBL, C-CAM, CNTF, COX-1, CSFIR, CTS-1, cytosine deaminase, DBCCR-1, DCC, Dp, DPC-4, ElA, E2F, EBRB2, erb, ERBA, ERBB, ETS1, ETS2, ETV6, Fab, FCC, FGF, FGR, FHIT, fms, FOX, FUS1, FYN, G-CSF, GDAIF, Gene 21 (NPRL2), Gene 26 (CACNA2D2), GM-CSF, GMF, gsp, HCR, HIC-1, HRAS, hst, IGF, IL-1, IL-2, IL-3, IL-5, IL-6, IL-7, IL-8, IL-9, IL-11, ING1, interferon α, interferon β, interferon γ, IRF-1, JUN, KRAS, LUCA-1 (HYAL1), LUCA-2 (HYAL2), LYN, MADH4, MADR2, MCC, mda7, MDM2, MEN-I, MEN-II, MLL, MMAC1, MYB, MYC, MYCL1, MYCN, neu, NF-1, NF-2, NGF, NOEY1, NOEY2, NRAS, NT3, NT5, OVCA1, p16, p21, p2′7, p5′7, p′73, p300, PGS, PIM1, PL6, PML, PTEN, raf, RaplA, ras, Rb, RB1, RET, rks-3, ScFv, scFV ras, SEM A3, SRC, TALI, TCL3, TFPI, thrombospondin, thymidine kinase, TNF, TP53, trk, T-VEC, VEGF, VHL, WT1, WT-1, YES, and zacl. Exemplary effective genetic therapies may suppress or eliminate tumors, result in a decreased number of cancer cells, reduced tumor size, slow or eliminate tumor growth, or alleviate symptoms caused by tumors.

[0171] As another example, a therapeutic gene can be selected to provide a therapeutically effective response against an infectious disease. In particular embodiments, the infectious disease is human immunodeficiency virus (HIV). The therapeutic gene may be, for example, a gene rendering immune cells resistant to HIV infection, or which enables immune cells to effectively neutralize the virus via immune reconstruction, polymorphisms of genes encoding proteins expressed by immune cells, genes advantageous for fighting infection that are not expressed in the patient, genes encoding an infectious agent, receptor or coreceptor; a gene encoding ligands for receptors or coreceptors; viral and cellular genes essential for viral replication including; a gene encoding ribozymes, antisense RNA, small interfering RNA (siRNA) or decoy RNA to block the actions of certain transcription factors; a gene encoding dominant negative viral proteins, intracellular antibodies, intrakines and suicide genes. Exemplary therapeutic genes and gene products include α2β1; αvβ3; αvβ5; αvβ63; BOB/GPR15; Bonzo/STRL-33/TYMSTR; CCR2; CCR3; CCR5; CCR8; CD4; CD46; CD55; CXCR4; aminopeptidase-N; HHV-7; ICAM; ICAM-1; PRR2/HveB; HveA; α-dystroglycan; LDLR/α2MR/LRP; PVR; PRR1/HveC; and laminin receptor. A therapeutically effective amount for the treatment of HIV, for example, may increase the immunity of a subject against HIV, ameliorate a symptom associated with AIDS or HIV, or induce an innate or adaptive immune response in a subject against HIV. An immune response against HIV may include antibody production and result in the prevention of AIDS and/or ameliorate a symptom of AIDS or HIV infection of the subject, or decrease or eliminate HIV infectivity and/or virulence.

### I(C)(i)(a). Binding Domain, Antibody, CAR, and TCR Payload Expression Products

[0172] The present disclosure includes payloads that can include sequences that encode any of a variety of binding domains. Sequences that encode binding domains can encode, for example, antibodies, chimeric antigen receptors, TCRs, or other binding polypeptides.

[0173] Antibodies and antibody fragments are exemplary of binding domains. The term “antibody” can refer to a polypeptide that includes one or more canonical immunoglobulin sequence elements sufficient to confer specific binding to a particular antigen (e.g., a heavy chain variable domain, a light chain variable domain, and/or one or more CDRs). Thus, the term antibody includes, without limitation, human antibodies, non-human antibodies, synthetic and/or engineered antibodies, fragments thereof, and agents including the same. Antibodies can be naturally occurring immunoglobulins (e.g., generated by an organism reacting to an antigen). Synthetic, non-naturally occurring, or engineered antibodies can be produced by recombinant engineering, chemical synthesis, or other artificial systems or methodologies known to those of skill in the art.

[0174] As is well known in the art, typical human immunoglobulins are approximately 150 kD tetrameric agents that include two identical heavy (H) chain polypeptides (about 50 kD each) and two identical light (L) chain polypeptides (about 25 kD each) that associate with each other to form a structure commonly referred to as a “Y-shaped” structure. Typically, each heavy chain includes a heavy chain variable domain (VH) and a heavy chain constant domain (CH). The heavy chain constant domain includes three CH domains: CH1, CH2 and CH3. A short region, known as the “switch”, connects the heavy chain variable and constant regions. The “hinge” connects CH2 and CH3 domains to the rest of the immunoglobulin. Each light chain includes a light chain variable domain (VL) and a light chain constant domain (CL), separated from one another by another “switch.” Each variable domain contains three hypervariable loops known as “complement determining regions” (CDR1, CDR2, and CDR3) and four somewhat invariant “framework” regions (FR1, FR2, FR3, and FR4). In each VH and VL, the three CDRs and four FRs are arranged from amino-terminus to carboxy-terminus in the following order: FR1, CDR1, FR2, CDR2, FR3, CDR3, and FR4. The variable regions of a heavy and/or a light chain are typically understood to provide a binding moiety that can interact with an antigen. Constant domains can mediate binding of an antibody to various immune system cells (e.g., effector cells and/or cells that mediate cytotoxicity), receptors, and elements of the complement system. Heavy and light chains are linked to one another by a single disulfide bond, and two other disulfide bonds connect the heavy chain hinge regions to one another, so that the dimers are connected to one another and the tetramer is formed. When natural immunoglobulins fold, the FR regions form the beta sheets that provide the structural framework for the domains, and the CDR loop regions from both the heavy and light chains are brought together in three-dimensional space so that they create a single hypervariable antigen binding site located at the tip of the Y structure.

[0175] In some embodiments, an antibody is polyclonal, monoclonal, monospecific, or multispecific antibodies (including bispecific antibodies). In some embodiments, an antibody includes at least one light chain monomer or dimer, at least one heavy chain monomer or dimer, at least one heavy chain-light chain dimer, or a tetramer that includes two heavy chain monomers and two light chain monomers. Moreover, the term “antibody” can include (unless otherwise stated or clear from context) any art-known constructs or formats utilizing antibody structural and/or functional features including without limitation intrabodies, domain antibodies, antibody mimetics, Zybodies®, Fab fragments, Fab′ fragments, F(ab′)2 fragments, Fd′ fragments, Fd fragments, isolated CDRs or sets thereof, single chain antibodies, single-chain Fvs (scFvs), disulfide-linked Fvs (sdFv), polypeptide-Fc fusions, single domain antibodies (e.g., shark single domain antibodies such as IgNAR or fragments thereof), cameloid antibodies, camelized antibodies, masked antibodies (e.g., Probodies®), affybodies, anti-idiotypic (anti-Id) antibodies (including, e.g., anti-anti-Id antibodies), Small Modular ImmunoPharmaceuticals (“SMIPs™”), single chain or Tandem diabodies (TandAb®), VHHs, Anticalins®, Nanobodies® minibodies, BiTE®s, ankyrin repeat proteins or DARPINs®, Avimers®, DARTs, TCR-like antibodies, Adnectins®, Affilins®, Trans-bodies®, Affibodies®, TrimerX®, MicroProteins, Fynomers®, Centyrins®, and KALBITOR®s, CARs, engineered TCRs, and antigen-binding fragments of any of the above.

[0176] In various embodiments, an antibody includes one or more structural elements recognized by those skilled in the art as a complementarity determining region (CDR) or variable domain. In some embodiments, an antibody can be a covalently modified (“conjugated”) antibody (e.g., an antibody that includes a polypeptide including one or more canonical immunoglobulin sequence elements sufficient to confer specific binding to a particular antigen, where the polypeptide is covalently linked with one or more of a therapeutic agent, a detectable moiety, another polypeptide, a glycan, or a polyethylene glycol molecule). In some embodiments, antibody sequence elements are humanized, primatized, chimeric, etc, as is known in the art.

[0177] An antibody including a heavy chain constant domain can be, without limitation, an antibody of any known class, including but not limited to, IgA, secretory IgA, IgG, IgE and IgM, based on heavy chain constant domain amino acid sequence (e.g., alpha (α), delta (δ), epsilon (ε), gamma (γ) and mu (μ)). IgG subclasses are also well known to those in the art and include but are not limited to human IgG1, IgG2, IgG3 and IgG4. “Isotype” refers to the Ab class or subclass (e.g., IgM or IgG1) that is encoded by the heavy chain constant region genes. As used herein, a “light chain” can be of a distinct type, e.g., kappa (κ) or lambda (λ), based on the amino acid sequence of the light chain constant domain. In some embodiments, an antibody has constant region sequences that are characteristic of mouse, rabbit, primate, or human immunoglobulins. Naturally-produced immunoglobulins are glycosylated, typically on the CH2 domain. As is known in the art, affinity and/or other binding attributes of Fc regions for Fc receptors can be modulated through glycosylation or other modification. In some embodiments, an antibody may lack a covalent modification (e.g., attachment of a glycan) that it would have if produced naturally. In some embodiments, antibodies produced and/or utilized in accordance with the present invention include glycosylated Fc domains, including Fc domains with modified or engineered such glycosylation.

[0178] The term “antibody fragment” can refer to a portion of an antibody or antibody agent as described herein, and typically refers to a portion that includes an antigen-binding portion or variable region thereof. An antibody fragment can be produced by any means. For example, in some embodiments, an antibody fragment can be enzymatically or chemically produced by fragmentation of an intact antibody or antibody agent. Alternatively, in some embodiments, an antibody fragment can be recombinantly produced (i.e., by expression of an engineered nucleic acid sequence. In some embodiments, an antibody fragment can be wholly or partially synthetically produced. In some embodiments, an antibody fragment (particularly an antigen-binding antibody fragment) can have a length of at least about 50, 60, 70, 80, 90, 100, 110, 120, 130, 140, 150, 160, 170, 180, 190 amino acids or more, in some embodiments at least about 200 amino acids.

[0179] In some instances, it is beneficial for the binding domain to be derived from the same species it will ultimately be used in. For example, for use in humans, it may be beneficial for the antigen binding domain to include a human antibody, humanized antibody, or a fragment or engineered form thereof. Antibodies from human origin or humanized antibodies have lowered or no immunogenicity in humans and have a lower number of non-immunogenic epitopes compared to non-human antibodies. Antibodies and their engineered fragments will generally be selected to have a reduced level or no antigenicity in human subjects.

[0180] In various embodiments, a payload can encode a binding agent that is a checkpoint inhibitor such as an antibody that specifically binds an immune checkpoint protein. A number of immune checkpoint inhibitors are known. Immune checkpoint inhibitors can include peptides, antibodies, nucleic acid molecules and small molecules. Examples of immune checkpoints include PD-1, PD-L1, lymphocyte activation gene-3 (LAG-3), and T cell immunoglobulin and mucin domain-containing molecule 3 (TIM-3).

[0181] The present disclosure further includes antibodies and other binding domains that bind CD4, CD5, CD7, CD52, etc.; antibodies; antibodies to ILL IL2, IL6; an antibody to TCR specifically present on autoreactive T cells; IL4; IL10; IL12; IL13; IL1Ra; sIL1RI; sIL1RII; antibodies to TNF; ABCA3; ABCD1; ADA; AK2; APP; arginase; arylsulfatase A; A1AT; CD3D; CD3E; CD3G; CD3Z; CFTR; CHD7; chimeric antigen receptor (CAR); CIITA; CLN3; complement factor, CORO1A; CTLA; C1 inhibitor; C90RF72; DCLRE1B; DCLRE1C; decoy receptors; DKC1; DRB1*1501/DQB1*0602; dystrophin; enzymes; Factor VIII, FANC family genes (FancA, FancB, FancC, FancD1 (BRCA2), FancD2, FancE, FancF, FancG, Fancl, FancJ (BRIP1), FancL, FancM, FancN (PALB2), FancO (RAD51C), FancP (SLX4), FancQ (ERCC4), FancR (RAD51), FancS (BRCA1), FancT (UBE2T), FancU (XRCC2), FancV (MAD2L2), and FancW (RFWD3)); Fas L; FUS; GATA1; globin family genes (ie. γ-globin); F8; glutaminase; HBA1; HBA2; HBB; IL7RA; JAK3; LCK; LIG4; LRRK2; NHEJ1; NLX2.1; neutralizing antibodies; ORAI1; PARK2; PARK7; phox; PINK1; PNP; PRKDC; PSEN1; PSEN2; PTPN22; PTPRC; P53; pyruvate kinase; RAG1; RAG2; RFXANK; RFXAP; RFX5; RMRP; ribosomal protein genes; SFTPB; SFTPC; SOD1; soluble CD40; STIM1; sTNFRI; sTNFRII; SLC46A1; SNCA; TDP43; TERT; TERC; TINF2; ubiquilin 2; WAS; WHN; ZAP70; yC; and other therapeutic genes described herein.

[0182] HSCs can be engineered to encode and/or express chimeric antigen receptor (CAR) constructs. CARs can include several distinct subcomponents that can cause cells to recognize and kill target cells such as cancer cells. The subcomponents include at least an extracellular component and an intracellular component.

[0183] An extracellular CAR component can include a binding domain that specifically binds a marker that is preferentially present on the surface of unwanted cells. When the binding domain binds such markers, the intracellular component directs a cell to destroy the bound cancer cell. The binding domain is typically a single-chain variable fragment (scFv) derived from a monoclonal antibody (mAb), but it can be based on other formats which include an antibody-like antigen binding site.

[0184] Intracellular CAR components provide activation signals based on the inclusion of an effector domain. First generation CARs utilized the cytoplasmic region of CD3 as an effector domain. Second generation CARs utilized CD3 in combination with cluster of differentiation 28 (CD28) or 4-1BB (CD137), while third generation CARs have utilized CD3 in combination with CD28 and 401BB within intracellular effector domains.

[0185] Intracellular or otherwise the cytoplasmic signaling components of a CAR are responsible for activation of the cell in which the CAR is expressed. The term “intracellular signaling components” or “intracellular components” is thus meant to include any portion of the intracellular domain sufficient to transduce an activation signal. Intracellular components of expressed CAR can include effector domains. An effector domain is an intracellular portion of a fusion protein or receptor that can directly or indirectly promote a biological or physiological response in a cell when receiving the appropriate signal. In certain embodiments, an effector domain is part of a protein or protein complex that receives a signal when bound, or it binds directly to a target molecule, which triggers a signal from the effector domain. An effector domain may directly promote a cellular response when it contains one or more signaling domains or motifs, such as an immunoreceptor tyrosine-based activation motif (ITAM). In other embodiments, an effector domain will indirectly promote a cellular response by associating with one or more other proteins that directly promote a cellular response, such as co-stimulatory domains.

[0186] Effector domains can provide for activation of at least one function of a modified cell upon binding to the cellular marker expressed by a cancer cell. Activation of the modified cell can include one or more of differentiation, proliferation and/or activation or other effector functions. In particular embodiments, an effector domain can include an intracellular signaling component including a T cell receptor and a co-stimulatory domain which can include the cytoplasmic sequence from a co-receptor or co-stimulatory molecule.

[0187] An effector domain can include one, two, three or more receptor signaling domains, intracellular signaling components (e.g., cytoplasmic signaling sequences), co-stimulatory domains, or combinations thereof. Exemplary effector domains include signaling and stimulatory domains selected from: 4-1BB (CD137), CARD11, CD3γ, CD3δ, CD3ε, CD3ζ, CD27, CD28, CD79A, CD79B, DAP10, FcRα, FcRβ (FcεR1b), FcRγ, Fyn, HVEM (LIGHTR), ICOS, LAG3, LAT, Lck, LRP, NKG2D, NOTCH1, pTα, PTCH2, OX40, ROR2, Ryk, SLAMF1, Slp76, TCRα, TCRβ, TRIM, Wnt, Zap70, or any combination thereof. In particular embodiments, exemplary effector domains include signaling and co-stimulatory domains selected from: CD86, FcγRIIa, DAP12, CD30, CD40, PD-1, lymphocyte function-associated antigen-1 (LFA-1), CD2, CD7, LIGHT, NKG2C, B7-H3, a ligand that specifically binds with CD83, CDS, ICAM-1, GITR, BAFFR, SLAMF7, NKp80 (KLRF1), CD127, CD160, CD19, CD4, CD8a, CD80, IL2Rf3, IL2Ry, IL7Ra, ITGA4, VLA1, CD49a, IA4, CD49D, ITGA6, VLA-6, CD49f, ITGAD, CD11d, ITGAE, CD103, ITGAL, CD11a, ITGAM, CD11b, ITGAX, CD11c, ITGB1, CD29, ITGB2, CD18, ITGB7, TNFR2, TRANCE/RANKL, DNAM1 (CD226), SLAMF4 (CD244, 2B4), CD84, CD96 (Tactile), CEACAM1, CRTAM, Ly9 (CD229), PSGL1, CD100 (SEMA4D), CD69, SLAMF6 (NTB-A, Ly108), SLAM (CD150, IPO-3), BLAME (SLAMF8), SELPLG (CD162), LTBR, GADS, PAG/Cbp, NKp44, NKp30, or NKp46.

[0188] Intracellular signaling component sequences that act in a stimulatory manner may include iTAMs. Examples of iTAMs including primary cytoplasmic signaling sequences include those derived from CD3γ, CD3δ, CD3ε, CD3ζ, CD5, CD22, CD66d, CD79a, CD79b, and common FcRγ (FCER1G), FcγRlla, FeRβ (Fcε Rib), DAP10, and DAP12. In particular embodiments, variants of CD3 retain at least one, two, three, or all ITAM regions.

[0189] In particular embodiments, an effector domain includes a cytoplasmic portion that associates with a cytoplasmic signaling protein, wherein the cytoplasmic signaling protein is a lymphocyte receptor or signaling domain thereof, a protein including a plurality of ITAMs, a co-stimulatory domain, or any combination thereof.

[0190] Additional examples of intracellular signaling components include the cytoplasmic sequences of the CD3ζ chain, and/or co-receptors that act in concert to initiate signal transduction following binding domain engagement.

[0191] A co-stimulatory domain is domain whose activation can be required for an efficient lymphocyte response to cellular marker binding. Some molecules are interchangeable as intracellular signaling components or co-stimulatory domains. Examples of costimulatory domains include CD27, CD28, 4-1BB (CD 137), OX40, CD30, CD40, PD-1, ICOS, lymphocyte function-associated antigen-1 (LFA-1), CD2, CD7, LIGHT, NKG2C, B7-H3, and a ligand that specifically binds with CD83. For example, CD27 co-stimulation has been demonstrated to enhance expansion, effector function, and survival of human CART cells in vitro and augments human T cell persistence and anti-cancer activity in vivo (Song et al. Blood. 2012; 119(3):696-706). Further examples of such co-stimulatory domain molecules include CDS, ICAM-1, GITR, BAFFR, HVEM (LIGHTR), SLAMF7, NKp80 (KLRF1), NKp44, NKp30, NKp46, CD160, CD19, CD4, CD8α, CD8β, IL2Rβ, IL2Rγ, IL7Rα, ITGA4, VLA1, CD49a, ITGA4, IA4, CD49D, ITGA6, VLA-6, CD49f, ITGAD, CD11d, ITGAE, CD103, ITGAL, CD11a, ITGAM, CD11b, ITGAX, CD11c, ITGB1, CD29, ITGB2, CD18, ITGB7, TNFR2, TRANCE/RANKL, DNAM1 (CD226), SLAMF4 (CD244, 2B4), CD84, CD96 (Tactile), NKG2D, CEACAM1, CRTAM, Ly9 (CD229), PSGL1, CD100 (SEMA4D), CD69, SLAMF6 (NTB-A, Ly108), SLAM (SLAMF1, CD150, IPO-3), BLAME (SLAMF8), SELPLG (CD162), LTBR, LAT, GADS, SLP-76, PAG/Cbp, and CD19a.

[0192] In particular embodiments, the amino acid sequence of the intracellular signaling component includes a variant of CD3ζ and a portion of the 4-1BB intracellular signaling component.

[0193] In particular embodiments, the intracellular signaling component includes (i) all or a portion of the signaling domain of CD3ζ, (ii) all or a portion of the signaling domain of 4-1BB, or (iii) all or a portion of the signaling domain of CD3ζ and 4-1BB.

[0194] Intracellular components may also include one or more of a protein of a Wnt signaling pathway (e.g., LRP, Ryk, or ROR2), NOTCH signaling pathway (e.g., NOTCH1, NOTCH2, NOTCH3, or NOTCH4), Hedgehog signaling pathway (e.g., PTCH or SMO), receptor tyrosine kinases (RTKs) (e.g., epidermal growth factor (EGF) receptor family, fibroblast growth factor (FGF) receptor family, hepatocyte growth factor (HGF) receptor family, insulin receptor (IR) family, platelet-derived growth factor (PDGF) receptor family, vascular endothelial growth factor (VEGF) receptor family, tropomycin receptor kinase (Trk) receptor family, ephrin (Eph) receptor family, AXL receptor family, leukocyte tyrosine kinase (LTK) receptor family, tyrosine kinase with immunoglobulin-like and EGF-like domains 1 (TIE) receptor family, receptor tyrosine kinase-like orphan (ROR) receptor family, discoidin domain (DDR) receptor family, rearranged during transfection (RET) receptor family, tyrosine-protein kinase-like (PTK7) receptor family, related to receptor tyrosine kinase (RYK) receptor family, or muscle specific kinase (MuSK) receptor family); G-protein-coupled receptors, GPCRs (Frizzled or Smoothened); serine/threonine kinase receptors (BMPR or TGFR); or cytokine receptors (IL1R, IL2R, IL7R, or IL15R).

[0195] CAR generally also include one or more linker sequences that are used for a variety of purposes within the molecule. For example, a transmembrane domain can be used to link the extracellular component of the CAR to the intracellular component. A flexible linker sequence often referred to as a spacer region that is membrane-proximal to the binding domain can be used to create additional distance between a binding domain and the cellular membrane. This can be beneficial to reduce steric hindrance to binding based on proximity to the membrane. A common spacer region used for this purpose is the IgG4 linker. More compact spacers or longer spacers can be used, depending on the targeted cell marker. Other potential CAR subcomponents are described in more detail elsewhere herein. Components of CAR are now described in additional detail as follows: (a) Binding Domains; (b) Intracellular Signalling Components; (c) Linkers; (d) Transmembrane Domains; (e) Junction Amino Acids; and (f) Control Features Including Tag Cassettes.

[0196] Transmembrane domains within a CAR molecule, often serve to connect the extracellular component and intracellular component through the cell membrane. The transmembrane domain can anchor the expressed molecule in the modified cell's membrane.

[0197] The transmembrane domain can be derived either from a natural and/or a synthetic source. When the source is natural, the transmembrane domain can be derived from any membrane-bound or transmembrane protein. Transmembrane domains can include at least the transmembrane region(s) of the α, β or ζ chain of a T-cell receptor, CD28, CD27, CD3 epsilon, CD45, CD4, CD5, CD8, CD9, CD16, CD22; CD33, CD37, CD64, CD80, CD86, CD134, CD137 and CD154. In particular embodiments, a transmembrane domain may include at least the transmembrane region(s) of, e.g., KIRDS2, OX40, CD2, CD27, LFA-1 (CD 11a, CD18), ICOS (CD278), 4-1BB (CD137), GITR, CD40, BAFFR, HVEM (LIGHTR), SLAMF7, NKp80 (KLRF1), NKp44, NKp30, NKp46, CD160, CD19, IL2Rβ, IL2Rγ, IL7R a, ITGA1, VLA1, CD49a, ITGA4, IA4, CD49D, ITGA6, VLA-6, CD49f, ITGAD, CD11d, ITGAE, CD103, ITGAL, CD11a, ITGAM, CD11b, ITGAX, CD11c, ITGB1, CD29, ITGB2, CD18, ITGB7, TNFR2, DNAM1(CD226), SLAMF4 (CD244, 2B4), CD84, CD96 (Tactile), CEACAM1, CRT AM, Ly9(CD229), PSGL1, CD100 (SEMA4D), SLAMF6 (NTB-A, Ly108), SLAM (SLAMF1, CD150, IPO-3), BLAME (SLAMF8), SELPLG (CD162), LTBR, PAG/Cbp, NKG2D, or NKG2C. In particular embodiments, a variety of human hinges can be employed as well including the human Ig (immunoglobulin) hinge (e.g., an IgG4 hinge, an IgD hinge), a GS linker (e.g., a GS linker described herein), a KIR2DS2 hinge or a CD8a hinge.

[0198] TCRs refer to naturally occurring T cell receptors. Payloads of the present disclosure can encode a TCR or a CAR/TCR hybrids that includes an element of a TCR and an element of a CAR. For example, a CAR/TCR hybrid could have a naturally occurring TCR binding domain with an effector domain that the TCR binding domain is not naturally associated with. A CAR/TCR hybrid could have a mutated TCR binding domain and an ITAM signaling domain. A CAR/TCR hybrid could have a naturally occurring TCR with an inserted non-naturally occurring spacer region or transmembrane domain.

### I(C)(i)(b). Gene Editing Systems and Components

[0199] In various embodiments, a payload of the present disclosure encodes at least one component, or all components, of a gene editing system. Gene editing systems of the present disclosure include CRISPR systems, base editing, and prime editing systems. Broadly, gene editing systems can include a plurality of components including a gene editing enzyme selected from a CRISPR-associated RNA-guided endonuclease, a base editing enzyme, and a prime editing enzyme and at least one gRNA. Accordingly, gene editing systems of the present disclosure can include either (i) in the case of a CRISPR system, a CRISPR enzyme that is a CRISPR-associated RNA-guided endonuclease and at least one guide RNA (gRNA), (ii) in the case of a base editing system, a base editing enzyme and at least one gRNA, or (iii) in the case of a prime editing system and at least one prime editing gRNA. Nucleotide sequences encoding gene editing systems as disclosed herein are typically too large for inclusion in many limited-capacity vector systems, but the large capacity of adenoviral vectors permits inclusion of such sequences in adenoviral vectors and genomes of the present disclosure. An additional advantage of adenoviral vectors and genomes with payloads encoding gene editing systems or components of the present disclosure is that adenoviral genomes do not naturally integrate into host cell genomes, which facilitates transient expression of gene editing systems and components, which can be desirable, e.g., to avoid immunogenicity and/or genotoxicity.

[0200] In other embodiments, a gene editing system can include engineered zing finger nucleases (ZFN). For instance, a ZFN is an artificial endonuclease that consists of a designed zinc finger protein (ZFP) fused to the cleavage domain of the FokI restriction enzyme. A ZFN may be redesigned to cleave new targets by developing ZFPs with new sequence specificities. For genome engineering, a ZFN is targeted to cleave a chosen genomic sequence. The cleavage event induced by the ZFN provokes cellular repair processes that in turn mediate efficient modification of the targeted locus. If the ZFN-induced cleavage event is resolved via non-homologous end joining, this can result in small deletions or insertions, effectively leading to gene knockout. If the break is resolved via a homology-based process in the presence of an investigator-provided donor, small changes or entire transgenes can be transferred, often without selection, into the chromosome; this is referred to as ‘gene correction’ and ‘gene addition’, respectively.

[0201] In some embodiments a gene editing system (e.g., a CRISPR system, base editing system, or prime editing system) is engineered to modify a nucleic acid sequence that encodes γ-globin, e.g., to increase expression of γ-globin. The main fetal form of hemoglobin, hemoglobin F (HbF) is formed by pairing of γ-globin polypeptide subunits with α-globin polypeptide subunits. Human fetal γ-globin genes (HBG1 and HBG2; two highly homologous genes produced by evolutionary duplication) are ordinarily silenced around birth, while expression of adult β-globin gene expression (HBB and HBD) increases. Mutations that cause or permit persistent expression of fetal γ-globin throughout life can ameliorate phenotypes of β-globin deficiencies. Thus, reactivation of fetal γ-globin genes can be therapeutically beneficial, particularly in subjects with β-globin deficiency. A variety of mutations that cause increased expression of γ-globin are known in the art (see, e.g., Wienert, Trends in Genetics 34(12): 927-940, 2018, which is incorporated herein by reference in its entirety and with respect to mutations that increase expression of γ-globin). Certain such mutations are found in the HBG1 promoter or HBG2 promoter.

[0202] In various embodiments, a gene editing system designed to increase expression of γ-globin includes an HBG1/2 promoter-targeted gRNA that is designed to increase expression of γ-globin coding by modification and/or inactivation of a BCL11A repressor protein binding site. In various embodiments, a gene editing system designed to increase expression of γ-globin includes a bcl11a-targeted gRNA that is designed to increase expression of γ-globin by modification and/or inactivation of the erythroid bcl11a enhancer to reduce BCL11A repressor protein expression in erythroid cells. In various embodiments, a gene editing system designed to increase expression of γ-globin includes a gRNA targeted to cause a loss of function mutation in the gene encoding BCL11A.

### I(C)(i)(b)(1). CRISPR Payload Expression Products

[0203] The CRISPR (Clustered Regularly Interspaced Short Palindromic Repeats)/Cas (CRISPR-associated protein) nuclease system is an engineered nuclease system used for genetic engineering that is based on a bacterial system. It is based in part on the adaptive immune response of many bacteria and archaea. When a virus or plasmid invades a bacterium, segments of the invader's DNA are converted into CRISPR RNAs (crRNA) by the bacteria's “immune” response. The crRNA then associates, through a region of partial complementarity, with another type of RNA called tracrRNA to guide a Cas nuclease to a region homologous to the crRNA in the target DNA called a “protospacer.” The Cas nuclease cleaves the DNA to generate blunt ends at the double-strand break at sites specified by a 20-nucleotide complementary strand sequence contained within the crRNA transcript. In some instances, the Cas nuclease requires both the crRNA and the tracrRNA for site-specific DNA recognition and cleavage.

[0204] Guide RNA (gRNA) is one example of a targeting element. In its simplest form, gRNA provides a sequence that targets a site within a genome based on complementarity (e.g., crRNA). As explained below, however, gRNA can also include additional components. For example, in particular embodiments, gRNA can include a targeting sequence (e.g., crRNA) and a component to link the targeting sequence to a cutting element. This linking component can be tracrRNA. In particular embodiments, gRNA including crRNA and tracrRNA can be expressed as a single molecule referred to as single gRNA (sgRNA). gRNA can also be linked to a cutting element through other mechanisms such as through a nanoparticle or through expression or construction of a dual or multi-purpose molecule. Those of skill in the art will appreciate that gRNA or other targeting elements to generate a selected nucleic acid sequence correction or modification, e.g., in a host cell of an adenoviral donor vector or genome of the present disclosure, can be readily designed and implemented, e.g., based on available sequence information.

[0205] In particular embodiments, targeting elements (e.g., gRNA) can include one or more modifications (e.g., a base modification, a backbone modification), to provide the nucleic acid with a new or enhanced feature (e.g., improved stability). Modified backbones may include those that retain a phosphorus atom in the backbone and those that do not have a phosphorus atom in the backbone. Suitable modified backbones containing a phosphorus atom may include, for example, phosphorothioates, chiral phosphorothioates, phosphorodithioates, phosphotriesters, aminoalkylphosphotriesters, methyl and other alkyl phosphonates such as 3′-alkylene phosphonates, 5′-alkylene phosphonates, chiral phosphonates, phosphinates, phosphoramidates including 3′-amino phosphoramidate and aminoalkylphosphoramidates, phosphorodiamidates, thionophosphoramidates, thionoalkylphosphonates, thionoalkylphosphotriesters, selenophosphates, and boranophosphates having normal 3′-5′ linkages, 2′-5′ linked analogs, and those having inverted polarity wherein one or more internucleotide linkages is a 3′ to 3′, a 5′ to 5′ or a 2′ to 2′ linkage. Suitable targeting elements having inverted polarity can include a single 3′ to 3′ linkage at the 3′-most internucleotide linkage (i.e. a single inverted nucleoside residue in which the nucleobase is missing or has a hydroxyl group in place thereof). Various salts (e.g., potassium chloride or sodium chloride), mixed salts, and free acid forms can also be included.

[0206] Examples of cutting elements include nucleases. CRISPR-Cas loci have more than 50 gene families and there are no strictly universal genes, indicating fast evolution and extreme diversity of loci architecture. Exemplary Cas nucleases include Cas1, Cas1B, Cas2, Cas3, Cas4, Cas5, Cash, Cas7, Cas8, Cas9 (also known as Csn1 and Csx12), Cas10, Cpf1, C2c3, C2c2 and C2c1Csy1, Csy2, Csy3, Cse1, Cse2, Csc1, Csc2, Csa5, Csn2, Csm2, Csm3, Csm4, Csm5, Csm6, Cmr1, Cmr3, Cmr4, Cmr5, Cmr6, Cpf1, Csb1, Csb2, Csb3, Csx17, Csx14, Csx10, Csx16, CsaX, Csx3, Csx1, Csx15, Csf1, Csf2, Csf3, and Csf4.

[0207] There are three main types of Cas nucleases (type I, type II, and type III), and 10 subtypes including 5 type I, 3 type II, and 2 type III proteins (see, e.g., Hochstrasser and Doudna, Trends Biochem Sci, 2015:40(1):58-66). Type II Cas nucleases include Cas1, Cas2, Csn2, and Cas9. These Cas nucleases are known to those skilled in the art. For example, the amino acid sequence of the Streptococcus pyogenes wild-type Cas9 polypeptide is set forth, e.g., in NCBI Ref. Seq. No. NP_269215, and the amino acid sequence of Streptococcus thermophilus wild-type Cas9 polypeptide is set forth, e.g., in NCBI Ref. Seq. No. WP_011681470.

[0208] In particular embodiments, Cas9 refers to an RNA-guided double-stranded DNA-binding nuclease protein or nickase protein. Wild-type Cas9 nuclease has two functional domains, e.g., RuvC and HNH, that cut different DNA strands. Cas9 can induce double-strand breaks in genomic DNA (target DNA) when both functional domains are active. The Cas9 enzyme, in some embodiments, includes one or more catalytic domains of a Cas9 protein derived from bacteria such as Corynebacter, Sutterella, Legionella, Treponema, Filif actor, Eubacterium, Streptococcus, Lactobacillus, Mycoplasma, Bacteroides, Flaviivola, Flavobacterium, Sphaerochaeta, Azospirillum, Gluconacetobacter, Neisseria, Roseburia, Parvibaculum, Staphylococcus, Nitratifractor, and Campylobacter. In some embodiments, the Cas9 is a fusion protein, e.g. the two catalytic domains are derived from different bacterial species.

[0209] In some embodiments, crRNA and tracrRNA can be combined into one molecule called a single gRNA (sgRNA). In this engineered approach, the sgRNA guides Cas to target any desired sequence (see, e.g., Jinek et al., Science 337:816-821, 2012; Jinek et al., eLife 2:e00471, 2013; Segal, eLife 2:e00563, 2013). Thus, the CRISPR/Cas system can be engineered to create a double-strand break at a desired target in a genome of a cell, and harness the cell's endogenous mechanisms to repair the induced break by HDR, or NHEJ. Particular embodiments described herein utilize homology arms to promote HDR at defined integration sites.

[0210] In various embodiments, variants of the Cas9 nuclease include a single inactive catalytic domain, such as a RuvC″ or HNH″ enzyme or a nickase. A Cas9 nickase has only one active functional domain and, in some embodiments, cuts only one strand of the target DNA, thereby creating a single strand break or nick. In some embodiments, the mutant Cas9 nuclease having at least a D10A mutation is a Cas9 nickase. In other embodiments, the mutant Cas9 nuclease having at least a H840A mutation is a Cas9 nickase. Other examples of mutations present in a Cas9 nickase include N854A and N863 A. A double-strand break is introduced using a Cas9 nickase if at least two DNA-targeting RNAs that target opposite DNA strands are used. A double-nicked induced double-strand break is repaired by HDR or NHEJ. This gene editing strategy generally favors HDR and decreases the frequency of indel mutations at off-target DNA sites. The Cas9 nuclease or nickase, in some embodiments, is codon-optimized for the target cell or target organism.

### I(C)(i)(b)(2). Base Editor Payload Expression Products

[0211] The present disclosure includes, among other things, base editing agents and nucleic acids encoding the same, e.g., where the base editing agent or nucleic acid encoding the same is present in an adenoviral vector or genome. A base editing system can include a base editing enzyme and/or at least one gRNA as components thereof. In certain particular embodiments, a base editing agent and/or a base editing system of the present disclosure is present in an Ad3, 7, 11, 14, 16, 21, 34, 37, or 50 adenoviral vector

[0212] Base editing refers to the selective modification of a nucleic acid sequence by converting a base or base pair within genomic DNA or cellular RNA to a different base or base pair (Rees & Liu, Nature Reviews Genetics, 19:770-788, 2018). There are two general classes of DNA base editors: (i) cytosine base editors (CBEs) that convert guanine-cytosine base pairs into thymine-adenine base pairs, and (ii) adenine base editors (ABEs) that convert adenine-thymine base pairs to guanine cytosine base pairs. In particular embodiments, components from the CRISPR system are combined with other enzymes or biologically active fragments thereof to directly install, cause, or generate mutations such as point mutations in nucleic acids, e.g., into DNA or RNA, e.g., without making, causing, or generating one or more double-stranded breaks in the mutated nucleic acid. Certain such combinations of components are known as base editors.

[0213] DNA base editors can include a catalytically disabled nuclease fused to a nucleobase deaminase enzyme and, in some cases, a DNA glycosylase inhibitor. RNA base editors achieve analogous changes using components that base modify RNA.

[0214] Upon binding to its target locus in DNA, base pairing between the guide RNA and target DNA strand leads to displacement of a small segment of single-stranded DNA. DNA bases within this single-stranded DNA bubble can be modified by the deaminase enzyme. In certain embodiments, to improve efficiency in eukaryotic cells, a catalytically disabled nuclease also generates a nick in the non-edited DNA strand, inducing cells to repair the non-edited strand using the edited strand as a template.

[0215] For CBEs, CRISPR-based editors can be produced by linking a cytosine deaminase with a Cas nickase, e.g., Cas9 nickase (nCas9). To provide one example, nCas9 can create a nick in target DNA by cutting a single strand, reducing the likelihood of detrimental indel formation as compared to methods that require a double-stranded break. After binding with DNA, the CBE deaminates a target cytosine (C) into a uracil (U) base. Later the resultant U-G pair is either repaired by cellular mismatch repair machinery making an original C-G pair converted to T-A or reverted to the original C-G by base excision repair mediated by uracil glycosylase. In various embodiments, expression of uracil glycosylase inhibitor (UGI), e.g., a UGI present in a payload, reduces the occurrence of the second outcome and increases the generation of T-A base pair formation.

[0216] For adenosine base editors (ABEs), exemplary adenosine deaminases that can act on DNA for adenine base editing include a mutant TadA adenosine deaminases (TadA*) that accepts DNA as its substrate. E. coli TadA typically acts as a homodimer to deaminate adenosine in transfer RNA (tRNA). TadA* deaminase catalyzes the conversion of a target ‘A’ to ‘I’ (inosine), which is treated as ‘G’ by cellular polymerases. Subsequently, an original genomic A-T base pair can be converted to a G-C pair. As the cellular inosine excision repair is not as active as uracil excision, ABE does not require any additional inhibitor protein like UGI in CBE. In some embodiments, a typical ABE can include three components including a wild-type E. coli tRNA-specific adenosine deaminase (TadA) monomer, which can play a structural role during base editing, a TadA* mutant TadA monomer that catalyzes deoxyadenosine deamination, and a Cas nickase such as Cas9(D10A). In certain embodiments, there is a linker positioned between TadA and TadA*, and in certain embodiments there is a linker positioned between TadA* and the Cas nickase. In various embodiments, one or both linkers includes at least 6 amino acids, e.g., at least 5, 6, 7, 8, 9, 10, 15, 20, 25, 30, 35, 40, 45, or 50 amino acids (e.g., having a lower bound of 5, 6, 7, 8, 9, 10, or 15, amino acids and an upper bound of 20, 25, 30, 35, 40, 45, or 50 amino acids). In various embodiments, one or both linkers include 32 amino acids. In some embodiments, one or both linkers has a sequence according to (SGGS)₂-XTEN-(SGGS)₂, or a sequence otherwise known to those of skill in the art.

[0217] Base editors can directly convert one base or base pair into another, enabling the efficient installation of point mutations in non-dividing cells without generating excess undesired editing by-products, such as insertions and deletions (indels). For example, base editors can generate less than 10%, 9%, 8%, 7%, 6%, 5.5%, 5%, 4.5%, 4%, 3.5%, 3%, 2.5%, 2%, 1.5%, 1%, 0.5%, or 0.1% indels.

[0218] DNA base editors can insert such point mutations in non-dividing cells without generating double-strand breaks. Due to the lack of double-strand breaks, base editors do not result in excess undesired editing by-products, such as insertions and deletions (indels). For example, base editors can generate fewer than 10%, 9%, 8%, 7%, 6%, 5.5%, 5%, 4.5%, 4%, 3.5%, 3%, 2.5%, 2%, 1.5%, 1%, 0.5%, or 0.1% indels as compared to technologies that do rely on double-strand breaks.

[0219] Components of most base-editing systems include (1) a targeted DNA binding protein, (2) a nucleobase deaminase enzyme, and (3) a DNA glycosylase inhibitor.

[0220] Any nuclease of the CRISPR system can be disabled and used within a base editing system. Exemplary Cas nucleases include Cas1, Cas1B, Cas2, Cas3, Cas4, Cas5, Cash, Cas7, Cas8, Cas9 (also known as Csn1 and Csx12), Cas10, Cpf1, C2c3, C2c2 and C2c1Csy1, Csy2, Csy3, Cse1, Cse2, Csc1, Csc2, Csa5, Csn2, Csm2, Csm3, Csm4, Csm5, Csm6, Cmr1, Cmr3, Cmr4, Cmr5, Cmr6, Cpf1, Csb1, Csb2, Csb3, Csx17, Csx14, Csx10, Csx16, CsaX, Csx3, Csx1, Csx15, Csf1, Csf2, Csf3, Csf4 and mutations thereof.

[0221] Particular embodiments utilize a nuclease-inactive Cas9 (dCas9) as the catalytically disabled nuclease. However, any nuclease of the CRISPR system (many of which are described above) can be disabled and used within a base editing system. In particular embodiments, a Cas9 domain with high fidelity is selected wherein the Cas9 domain displays decreased electrostatic interactions between the Cas9 domain and a sugar-phosphate backbone of a DNA, as compared to a wild-type Cas9 domain. In some embodiments, a Cas9 domain (e.g., a wild type Cas9 domain) includes one or more mutations that decrease the association between the Cas9 domain and a sugar-phosphate backbone of a DNA. Cas9 domains with high fidelity are known to those skilled in the art. For example, Cas9 domains with high fidelity have been described in Kleinstiver, et al., Nature 529, 490-495, 2016; and Slaymaker et al., Science 351, 84-88, 2015.

[0222] Nucleases from other gene-editing systems may also be used. For example, base-editing systems can utilize zinc finger nucleases (ZFNs) (Urnov et al., Nat Rev Genet., 11(9):636-46, 2010) and transcription activator like effector nucleases (TALENs) (Joung et al., Nat Rev Mol Cell Biol. 14(1):49-55, 2013). For additional information regarding DNA-binding nucleases, see US2018/0312825A1.

[0223] In particular embodiments, the nucleobase deaminase enzyme includes a cytidine deaminase domain or an adenine deaminase domain.

[0224] Particular embodiments utilize a cytidine deaminase domain as the nucleobase deaminase enzyme. Particular embodiments utilize an adenine deaminase domain as the nucleobase deaminase enzyme. Further, particular embodiments utilize a uracil glycosylase inhibitor (UGI) as a glycosylase inhibitor. For example, in particular embodiments, dCas9 or a Cas9 nickase can be fused to a cytidine deaminase domain. The dCas9 or a Cas9 nickase fused to the cytidine deaminase domain can be fused to one or more UGI domains. Base editors with more than one UGI domain can generate less indels and more efficiently deaminates target nucleic acids.

[0225] In particular embodiments, a deaminase domain (cytidine and/or adenine) is fused to the N-terminus of the catalytically disabled nuclease. This is because a cytidine deaminase domain fused to the N-terminus of Cas9 can have improved base-editing efficiency when compared to other configurations. In these embodiments, a glycosylase inhibitor (e.g., UGI domain) can be fused to the C-terminus of the catalytically disabled nuclease. When multiple glycosylase inhibitors are used, each can be fused to the C-terminus of the catalytically disabled nuclease.

[0226] In particular embodiments, CBE utilizing a cytidine deaminase domain convert guanine-cytosine base pairs into thymine-adenine base pairs by deaminating the exocyclic amine of the cytosine to generate uracil. Examples of cytosine deaminase enzymes include APOBEC1, APOBEC3A, APOBEC3G, CDA1, and AID. APOBEC1 particularly accepts single stranded (ss)DNA as a substrate but is incapable of acting on double stranded (ds)DNA.

[0227] Most base-editing systems also include a DNA glycosylase inhibitor that serves to override natural DNA repair mechanisms that might otherwise repair the intended base editing. In particular embodiments, the DNA glycosylase inhibitor includes an uracil glycosylase inhibitor, such as the uracil DNA glycosylase inhibitor protein (UGI) described in Wang et al. (Gene 99, 31-37, 1991).

[0228] Components of base editors can be fused directly (e.g., by direct covalent bond) or via linkers. For example, the catalytically disabled nuclease can be fused via a linker to the deaminase enzyme and/or a glycosylase inhibitor. Multiple glycosylase inhibitors can also be fused via linkers. As will be understood by one of ordinary skill in the art, linkers can be used to link any peptides or portions thereof.

[0229] Exemplary linkers include polymeric linkers (e.g., polyethylene, polyethylene glycol, polyamide, polyester); amino acid linkers; carbon-nitrogen bond amide linkers; cyclic or acyclic, substituted or unsubstituted, branched or unbranched aliphatic or heteroaliphatic linkers; monomeric, dimeric, or polymeric aminoalkanoic acid linkers; aminoalkanoic acid (e.g., glycine, ethanoic acid, alanine, β-alanine, 3-aminopropanoic acid, 4-aminobutanoic acid, 5-pentanoic acid) linkers; monomeric, dimeric, or polymeric aminohexanoic acid (Ahx) linkers; carbocyclic moiety (e.g., cyclopentane, cyclohexane) linkers; aryl or heteroaryl moiety linkers; and phenyl ring linkers.

[0230] Linkers can also include functionalized moieties to facilitate attachment of a nucleophile (e.g., thiol, amino) from a peptide to the linker. Any electrophile may be used as part of the linker. Exemplary electrophiles include activated esters, activated amides, Michael acceptors, alkyl halides, aryl halides, acyl halides, and isothiocyanates.

[0231] In particular embodiments, linkers range from 4-100 amino acids in length. In particular embodiments, linkers are 4 amino acids, 9 amino acids, 14 amino acids, 16 amino acids, 32 amino acids, or 100 amino acids.

[0232] Numerous base-editing (BE) systems formed by linking targeted DNA binding proteins with cytidine deaminase enzymes and DNA glycosylase inhibitors (e.g., UGI) have been described. These complexes include for example, BE1 ([APOBEC1-16 amino acid (aa) linker-Sp dCas9 (D10A, H840A)] Komer et al., Nature, 533, 420-424, 2016), BE2 ([APOBEC1-16aa linker-Sp dCas9 (D10A, H840A)-4aa linker-UGI] Komer et al., 2016 supra), BE3 ([APOBEC1-16aa linker-Sp nCas9 (D10A)-4aa linker-UGI] Komer et al., supra), HF-BE3 ([APOBEC1-16aa linker-HF nCas9 (D10A)-4aa linker-UGI] Rees et al., Nat. Commun. 8, 15790, 2017), BE4, BE4max ([APOBEC1-32aa linker-Sp nCas9 (D10A)-9aa linker-UGI-9aa linker-UGI] Koblan et al., Nat. Biotechnol 10.1038/nbt.4172, 2018; Komer et al., Sci. Adv., 3, eaao4774, 2017), BE4-GAM ([Gam-16aa linker-APOBEC1-32aa linker-Sp nCas9 (D10A)-9aa linker-UGI-9aa linker-UGI] Komer et al., 2017 supra), YE1-BE3 ([APOBEC1 (W90Y, R126E)-16aa linker-Sp nCas9 (D10A)-4aa linker-UGI] Kim et al., Nat. Biotechnol. 35, 475-480, 2017), EE-BE3 ([APOBEC1 (R126E, R132E)-16aa linker-Sp nCas9 (D10A)-4aa linker-UGI] Kim et al., 2017 supra), YE2-BE3 ([APOBEC1 (W90Y, R132E)-16aa linker-Sp nCas9 (D10A)-4aa linker-UGI]Kim et al., 2017 supra), YEE-BE3 ([APOBEC1 (W90Y, R126E, R132E)-16aa linker-Sp nCas9 (D10A)-4aa linker-UGI] Kim et al., 2017 supra), VQR-BE3 ([APOBEC1-16aa linker-Sp VQR nCas9 (D10A)-4aa linker-UGI] Kim et al., 2017 supra), VRER-BE3 ([APOBEC1-16aa linker-Sp VRER nCas9 (D10A)-4aa linker-UGI] Kim et al., Nat. Biotechnol. 35, 475-480, 2017), Sa-BE3 ([APOBEC1-16aa linker-Sa nCas9 (D10A)-4aa linker-UGI] Kim et al., 2017 supra), SA-BE4 ([APOBEC1-32aa linker-Sa nCas9 (D10A)-9aa linker-UGI-9aa linker-UGI] Komer et al., 2017 supra), SaBE4-Gam ([Gam-16aa linker-APOBEC1-32aa linker-Sa nCas9 (D10A)-9aa linker-UGI-9aa linker-UGI] Komer et al., 2017 supra), SaKKH-BE3 ([APOBEC1-16aa linker-Sa KKH nCas9 (D10A)-4aa linker-UGI] Kim et al., 2017 supra), Cas12a-BE ([APOBEC1-16aa linker-dCas12a-14aa linker-UGI], Li et al., Nat. Biotechnol. 36, 324-327, 2018), Target-AID ([Sp nCas9 (D10A)-100aa linker-CDA1-9aa linker-UGI] Nishida et al., Science, 353, 10.1126/science.aafi3729, 2016), Target-AID-NG ([Sp nCas9 (D10A)-NG-100aa linker-CDA1-9aa linker-UGI] Nishimasu et al., Science, 361(6408): 1259-1262, 2018), xBE3 ([APOBEC1-16aa linker-xCas9(D10A)-4aa linker-UGI] Hu et al., Nature, 556, 57-63, 2018), eA3A-BE3 ([APOBEC3A (N37G)-16aa linker-Sp nCas9(D10A)-4aa linker-UGI] Gerkhe et al., Nat. Biotechnol., 10.1038/nbt.4199, 2018), A3A-BE3 ([hAPOBEC3A-16aa linker-Sp nCas9(D10A)-4aa linker-UGI] Wang et al., Nat. Biotechnol. 10.1038/nbt.4198, 2018), and BE-PLUS ([10X GCN4-Sp nCas9(D10A)/ScFv-rAPOBEC1-UGI] Jiang et al., Cell. Res, 10.1038/s41422-018-0052-4, 2018). For additional examples of BE complexes, including adenine deaminase base editors, see Rees & Liu Nat. Rev Genet. 19(12): 770-788, 2018.

[0233] For additional information regarding base editors, see US2018/0312825A1, WO02018/165629A, Urnov et al., Nat Rev Genet. 11(9):636-46, 2010; Joung et al., Nat Rev Mol Cell Biol. 14(1):49-55, 2013; Charpentier et al., Nature.; 495(7439):50-1, 2013; Seo & Kim, Nature Medicine, 24, 1493-1495, 2018, and Rees & Liu, Nature Reviews Genetics, 19, 770-78, 2018 each of which is incorporated herein by reference in its entirety and with specific respect to base editors. Certain base editor constructs that can be used in various embodiments of the present disclosure are described in Zafra et al., Nat Biotech, 36(9):888-893, 2018, and Koblan et al., Nat. Biotech 36(9). 843-846, 2018, each of which is incorporated herein by reference in its entirety and with specific respect to base editor constructs.

### I(C)(i)(b)(3). Prime Editor Payload Expression Products

[0234] Prime editing can introduce all possible types of point mutations, small insertions, and small deletions in a precise and targeted manner. Prime editors are fusion proteins including a Cas9 nickase domain (e.g., an inactivated HNH nuclease) and an engineered reverse transcriptase domain. The prime editor enzyme is targeted to the editing site by an engineered prime editing gRNA (pegRNA), which not only specifies the target site in its spacer sequence, but also encodes the desired edit in an extension that is typically at the 3′ end of the pegRNA.

[0235] At least three prime editor system have been characterized. PE1 includes a fusion of Cas9 nickase with wild-type Moloney murine leukemia virus (M-MLV) reverse transcriptase (RT). PE2 is similar to PE1 but includes an engineered pentamutant M-MLV RT that increases editing efficiency by about threefold. PE3 combines the PE2 fusion protein and pegRNA with an additional sgRNA that targets the non-edited strand for nicking. A variant of the PE3 system called PE3b includes a nicking sgRNA that targets only the edited sequence, resulting in decreased levels of indel products by preventing nicking of the non-edited DNA strand until the other strand has been converted to the edited sequence.

### I(C)(i)(c). Small RNA Payload Expression Products

[0236] Small RNAs are short, non-coding RNA molecules that play a role in regulating gene expression. In particular embodiments, small RNAs are less than 200 nucleotides in length. In particular embodiments, small RNAs are less than 100 nucleotides in length. In particular embodiments, small RNAs are less than 50, 45, 40, 35, 30, 25, or 20 nucleotides in length. In particular embodiments, small RNAs are less than 20 nucleotides in length. In various embodiments a small RNA has a length having a lower bound of 5, 10, 15, 20, 25, or 30 nucleotides and an upper bound of 20, 25, 30, 35, 40, 45, 50, 75, or 100 nucleotides. Small RNAs include but are not limited to microRNAs (miRNAs, Piwi-interacting RNAs (piRNAs), small interfering RNAs (siRNAs), small nucleolar RNAs (snoRNAs), tRNA-derived small RNAs (tsRNAs) small rDNA-derived RNAs (srRNAs), and small nuclear RNAs. Additional classes of small RNAs continue to be discovered.

[0237] In particular embodiments, interfering RNA molecules that are homologous to a target mRNA or to which the interfering RNA can hybridize can lead to degradation of the target mRNA molecule or reduced translation of the target mRNA, a process referred to as RNA interference (RNAi) (Carthew, Curr. Opin. Cell. Biol. 13: 244-248, 2001). RNAi occurs in cells naturally to remove foreign RNAs (e.g., viral RNAs). In some instances, natural RNAi proceeds via fragments cleaved from free double-strand RNA (dsRNA) which direct the degradative mechanism to other similar RNA sequences. Alternatively, RNAi can be manufactured, for example, to silence the expression of target genes. Exemplary RNAi molecules include small hairpin RNA (shRNA, also referred to as short hairpin RNA) and small interfering RNA (siRNA).

[0238] Without limiting the disclosure, and without being bound by theory, RNA interference in nature and/or in some embodiments is typically a two-step process. In the first step, the initiation step, input dsRNA is digested into 21-23 nucleotide (nt) siRNA, probably by the action of Dicer, a member of the ribonuclease (RNase) III family of dsRNA-specific ribonucleases, which processes (cleaves) dsRNA (introduced directly or via a transgene or a virus) in an ATP-dependent manner. Successive cleavage events degrade the RNA to 19-21 base pair (bp) duplexes (siRNA), each with 2-nucleotide 3′ overhangs.

[0239] In a second step, an effector step, the siRNA duplexes bind to a nuclease complex to form the RNA-induced silencing complex (RISC). An ATP-dependent unwinding of the siRNA duplex is required for activation of the RISC. The active RISC then targets the homologous transcript by base pairing interactions and typically cleaves the mRNA into 12 nucleotide fragments from the 3′ terminus of the siRNA. Research indicates that each RISC contains a single siRNA and an RNase.

[0240] Because of the remarkable potency of RNAi, an amplification step within the RNAi pathway has been suggested. Amplification could occur by copying of the input dsRNAs which would generate more siRNAs, or by replication of the siRNAs formed. Alternatively or additionally, amplification could be effected by multiple turnover events of the RISC.

[0241] ShRNAs are single-stranded polynucleotides with a hairpin loop structure. The single-stranded polynucleotide has a loop segment linking the 3′ end of one strand in the double-stranded region and the 5′ end of the other strand in the double-stranded region. The double-stranded region is formed from a first sequence that is hybridizable to a target sequence, such as a polynucleotide encoding transgene, and a second sequence that is complementary to the first sequence, thus the first and second sequence form a double stranded region to which the linking sequence connects the ends of to form the hairpin loop structure. The first sequence can be hybridizable to any portion of a polynucleotide encoding transgene. The double-stranded stem domain of the shRNA can include a restriction endonuclease site.

[0242] Transcription of shRNAs is initiated at a polymerase III (Pol III) promoter and is thought to be terminated at position 2 of a 4-5-thymine transcription termination site. Upon expression, shRNAs are thought to fold into a stem-loop structure with 3′ UU-overhangs; subsequently, the ends of these shRNAs are processed, converting the shRNAs into siRNA-like molecules of 21-23 nucleotides.

[0243] The stem-loop structure of shRNAs can have optional nucleotide overhangs, such as 2-bp overhangs, for example, 3′ UU overhangs. While there may be variation, stems typically range from 15 to 49, 15 to 35, 19 to 35, 21 to 31 bp, or 21 to 29 bp, and the loops can range from 4 to 30 bp, for example, 4 to 23 bp. In particular embodiments, shRNA sequences include 45-65 bp; 50-60 bp; or 51, 52, 53, 54, 55, 56, 57, 58, or 59 bp. In particular embodiments, shRNA sequences include 52 or 55 bp. In particular embodiments siRNAs have 15-25 bp. In particular embodiments siRNAs have 16, 17, 18, 19, 20, 21, 22, 23, or 24 bp. In particular embodiments siRNAs have 19 bp. The skilled artisan will appreciate, however, that siRNAs having a length of less than 16 nucleotides or greater than 24 nucleotides can also function to mediate RNAi. Longer RNAi agents have been demonstrated to elicit an interferon or Protein kinase R (PKR) response in certain mammalian cells which may be undesirable. Preferably the RNAi agents do not elicit a PKR response (i.e., are of a sufficiently short length). However, longer RNAi agents may be useful, for example, in situations where the PKR response has been downregulated or dampened by alternative means.

[0244] In certain illustrative embodiments, the present disclosure includes an adenoviral vector payload that encodes an shRNA targeted to the gene encoding BCL11A, where the shRNA causes decreased translation of BCL11A.

### I(C)(ii). Payload Regulatory Sequences

### I(C)(ii)(a). Promoter Regulatory Sequences

[0245] A promoter can be a non-coding genomic DNA sequence, usually upstream (5′) to the relevant coding sequence, to which RNA polymerase binds before initiating transcription. This binding aligns the RNA polymerase so that transcription will initiate at a specific transcription initiation site. The nucleotide sequence of the promoter determines the nature of the enzyme and other related protein factors that attach to it and the rate of RNA synthesis. The RNA is processed to produce messenger RNA On RNA) which serves as a template for translation of the RNA sequence into the amino acid sequence of the encoded polypeptide. The 5′ non-translated leader sequence is a region of the mRNA upstream of the coding region that may play a role in initiation and translation of the mRNA. The 3′ transcription termination/polyadenylation signal is a non-translated region downstream of the coding region that functions in the plant cell to cause termination of the RNA synthesis and the addition of polyadenylate nucleotides to the 3′ end.

[0246] Promoters can include general promoters, tissue-specific promoters, cell-specific promoters, and/or promoters specific for the cytoplasm. Promoters may include strong promoters, weak promoters, constitutive expression promoters, and/or inducible (conditional) promoters. Inducible promoters direct or control expression in response to certain conditions, signals, or cellular events. For example, the promoter may be an inducible promoter that requires a particular ligand, small molecule, transcription factor, hormone, or hormone protein in order to effect transcription from the promoter. Particular examples of promoters include the AFP (α-fetoprotein) promoter, amylase 1C promoter, aquaporin-5 (AP5) promoter, α1-antitrypsin promoter, β-act promoter, β-globin promoter, β-Kin promoter, B29 promoter, CCKAR promoter, CD14 promoter, CD43 promoter, CD45 promoter, CD68 promoter, CEA promoter, c-erbB2 promoter, COX-2 promoter, CXCR4 promoter, desmin promoter, E2F-1 promoter, human elongation factor 1α promoter (EF1α), CMV (cytomegalovirus viral) promoter, minCMV promoter, SV40 (simian virus 40) immediately early promoter, EGR1 promoter, eIF4A1 promoter, elastase-1 promoter, endoglin promoter, FerH promoter, FerL promoter, fibronectin promoter, Flt-1 promoter, GAPDH promoter, GFAP promoter, GPIIb promoter, GRP78 promoter, GRP94 promoter, HE4 promoter, hGR1/1 promoter, hNIS promoter, Hsp68 promoter, the Hsp68 minimal promoter (proHSP68), HSP70 promoter, HSV-1 virus TK gene promoter, hTERT promoter, ICAM-2 promoter, kallikrein promoter, LP promoter, major late promoter (MLP), Mb promoter, Rho promoter, MT (metallothionein) promoter, MUC1 promoter, NphsI promoter, OG-2 promoter, PGK (Phospho Glycerate kinase) promoters, PGK-1 promoter, polymerase III (Pol III) promoter, PSA promoter, ROSA promoter, SP-B promoter, Survivn promoter, SYN1 promoter, SYT8 gene promoter, TRP1 promoter, Tyr promoter, ubiquitin B promoter, WASP promoter, and the Rous Sarcoma Virus (RSV) long-terminal repeat (LTR) promoter

[0247] Promoters may be obtained as native promoters or composite promoters. Native promoters, or minimal promoters, refer to promoters that include a nucleotide sequence from the 5′ region of a given gene. A native promoter includes a core promoter and its natural 5′UTR. In particular embodiments, the 5′UTR includes an intron. Composite promoters refer to promoters that are derived by combining promoter elements of different origins or by combining a distal enhancer with a minimal promoter of the same or different origin.

[0248] In particular embodiments, promoters include wild type promoter sequences and sequences with optional changes (including insertions, point mutations or deletions) at certain positions relative to the wild-type promoter. In particular embodiments, promoters vary from naturally occurring promoters by having 1 change per 20 nucleotide stretch, 2 changes per 20 nucleotide stretch, 3 changes per 20 nucleotide stretch, 4 changes per 20 nucleotide stretch, or 5 changes per 20 nucleotide stretch. In particular embodiments, the natural sequence will be altered in 1, 2, 3, 4, 5, 6, 7, 8, 9, or 10 bases. The promoter may vary in length, including from 50 nucleotides of LTR sequence to 100, 200, 250 or 350 nucleotides of LTR sequence, with or without other viral sequence.

[0249] Some promoters are specific to a tissue or cell and some promoters are non-specific to a tissue or cell. Each gene in mammalian cells has its own promoter and some promoters can only be activated in certain cell types. A non-specific promoter, or ubiquitous promoter, aids in initiation of transcription of a gene or nucleotide sequence that is operably linked to the promoter sequence in a wide range of cells, tissues and cell cycles. In particular embodiments, the promoter is a non-specific promoter. In particular embodiments, a non-specific promoter includes CMV promoter, RSV promoter, SV40 promoter, mammalian elongation factor 1α (EF1α) promoter, β-act promoter, EGR1 promoter, eIF4A1 promoter, FerH promoter, FerL promoter, GAPDH promoter, GRP78 promoter, GRP94 promoter, HSP70 promoter, β-Kin promoter, PGK-1 promoter, ROSA promoter, and/or ubiquitin B promoter.

[0250] A specific promoter aids in cell specific expression of a nucleotide sequence that is operably linked to the promoter sequence.

### I(C)(ii)(b). Micro RNA Site Regulatory Sequences

[0251] In various embodiments, a microRNA (or miRNA) control system can refer to a method or composition in which expression of a gene is regulated by the presence of microRNA sites (e.g., nucleic acid sequences with which a microRNA can interact). In various embodiments, the present disclosure includes an adenoviral donor vector that includes a payload in which a nucleic acid sequence encoding an expression product is operably linked to an miRNA target site such that expression of the expression product is controlled by presence, level, activity, and/or contact with a corresponding miRNA. For the avoidance of doubt the present disclosure contemplates that a nucleic acid sequence operably linked with an miRNA site, e.g., as disclosed herein can be a nucleic acid sequence that encodes, e.g., any of one or more expression products provided herein.

### I(C)(iii). Selection Sequences

[0252] In particular embodiments vectors include a selection element including a selection cassette. In particular embodiments, a selection cassette includes a promoter, a cDNA that adds or confers resistance to a selection agent, and a poly A sequence that enables stopping the transcription of this independent transcriptional element.

[0253] A selection cassette can encode one or more proteins that (a) confer resistance to antibiotics or other toxins, (b) complement auxotrophic deficiencies, or (c) supply critical nutrients not available from complex media, e.g., the gene encoding D-alanine racemase for Bacilli. Any number of selection systems may be used to recover transformed cell lines. In particular embodiments, a positive selection cassette includes resistance genes to neomycin, hygromycin, ampicillin, puromycin, phleomycin, zeomycin, blasticidin, or viomycin. In particular embodiments, a positive selection cassette includes the DHFR (dihydrofolate reductase) gene providing resistance to methotrexate, the MGMT^{P140K} gene responsible for the resistance to O⁶BG/BCNU, the HPRT (Hypoxanthine phosphoribosyl transferase) gene responsible for the transformation of specific bases present in the HAT selection medium (aminopterin, hypoxanthine, thymidine) and other genes for detoxification with respect to some drugs. In particular embodiments, the selection agent includes neomycin, hygromycin, puromycin, phleomycin, zeomycin, blasticidin, viomycin, ampicillin, O⁶BG/BCNU, methotrexate, tetracycline, aminopterin, hypoxanthine, thymidine kinase, DHFR, Gln synthetase, or ADA.

[0254] In particular embodiments, negative selection cassettes include a gene for transformation of a substrate present in the culture medium into a toxic substance for the cell that expresses the gene. These molecules include detoxification genes of diptheria toxin (DTA) (Yagi et al., Anal Biochem. 214(1):77-86, 1993; Yanagawa et al., Transgenic Res. 8(3):215-221, 1999), the kinase thymidine gene of the Herpes virus (HSV TK) sensitive to the presence of ganciclovir or FIAU. The HPRT gene may also be used as a negative selection by addition of 6-thioguanine (6TG) into the medium. and for all positive and negative selections, a poly A transcription termination sequence from different origins, the most classical being derived from SV40 poly A, or a eukaryotic gene poly A (bovine growth hormone, rabbit β-globin, etc.).

[0255] In particular embodiments, the selection cassette includes MGMT^{P140K} as described in Olszko et al. (Gene Therapy 22: 591-595, 2015). In particular elements, the selection agent includes O⁶BG/BCNU.

[0256] The drug resistant gene MGMT encoding human alkyl guanine transferase (hAGT) is a DNA repair protein that confers resistance to the cytotoxic effects of alkylating agents, such as nitrosoureas and temozolomide (TMZ). 6-benzylguanine (6-BG) is an inhibitor of AGT that potentiates nitrosourea toxicity and is co-administered with TMZ to potentiate the cytotoxic effects of this agent. Several mutant forms of MGMT that encode variants of AGT are highly resistant to inactivation by 6-BG but retain their ability to repair DNA damage (Maze et al., J. Pharmacol. Exp. Ther. 290: 1467-1474, 1999). MGMT^{P140K}-based drug resistant gene therapy has been shown to confer chemoprotection to mouse, canine, rhesus macaques, and human cells, specifically hematopoietic cells (Zielske et al., J. Clin. Invest. 112: 1561-1570, 2003; Pollok et al., Hum. Gene Ther. 14: 1703-1714, 2003; Gerull et al., Hum. Gene Ther. 18: 451-456, 2007; Neff et al., Blood 105: 997-1002, 2005; Larochelle et al., J. Clin. Invest. 119: 1952-1963, 2009; Sawai et al., Mol. Ther. 3: 78-87, 2001).

[0257] In particular embodiments, combination with an in vivo selection cassette will be a critical component for diseases without a selective advantage of gene-corrected cells. For example, in SCID and some other immunodeficiencies and FA, corrected cells have an advantage and only transducing the therapeutic gene into a “few” HSPCs is sufficient for therapeutic efficacy. For other diseases like hemoglobinopathies (i.e., sickle cell disease and thalassemia) in which therapeutically modified cells do not demonstrate a competitive advantage, in vivo selection of the modified cells, e.g., for expression of an in vivo selection cassette such as MGMT^{P140K}, will select for the few transduced HSPCs, allowing an increase in the gene corrected cells and in order to achieve therapeutic efficacy. This approach can also be applied to HIV by making HSPCs resistant to HIV in vivo rather than ex vivo genetic modification.

### I(C)(iv). Stuffer Sequences

[0258] In particular embodiments, the vector includes a stuffer sequence. In particular embodiments, the stuffer sequence may be added to render the genome at a size near that of wild-type length. Stuffer is a term generally recognized in the art intended to define functionally inert sequence intended to extend the length of the genome.

[0259] The stuffer sequence is used to achieve efficient packaging and stability of the vector. In particular embodiments, the stuffer sequence is used to render the genome size between 70% and 110% of that of the wild type virus.

[0260] The stuffer sequences can be any DNA, preferably of mammalian origin. In a preferred embodiment of the invention, stuffer sequences are non-coding sequences of mammalian origin, for example intronic fragments.

[0261] The stuffer sequence, when used to keep the size of the vector a predetermined size, can be any non-coding sequence or sequence that allows the genome to remain stable in dividing or nondividing cells. These sequences can be derived from other viral genomes (e.g. Epstein bar virus) or organism (e.g. yeast). For example, these sequences could be a functional part of centromeres and/or telomeres.

### I(C)(v). Payload Integration and Support Vectors

[0262] Gene therapy often requires integration of a desired nucleic acid payload into the genome of a target cell. A variety of systems can be designed and/or used for integration of a payload into a host or target cell genome. Various such systems can include one or more of certain payload sequence features and support vectors and support genomes (support genomes).

[0263] One means of engineering adenoviral vectors that integrate a payload into a host cell genome has been to produce integrating viral hybrid vectors. Integrating viral hybrid vectors combine genetic elements of a vector that efficiently transduces target cells with genetic elements of a vector that stably integrates its vector payload. Integration elements of interest, e.g., for use in combination with adenoviral vectors, have included those of bacteriophage integrase PHiC31, retrotransposons, retrovirus (e.g., LTR-mediated or retrovirus integrate-mediated), zinc-finger nuclease, DNA-binding domain-retroviral integrase fusion proteins, AAV (e.g., AAV-ITR or AAV-Rep protein-mediated), and Sleeping Beauty (SB) transposase.

[0264] Ad3, 7, 11, 14, 16, 21, 34, 37, or 50 vectors described herein can optionally include transposable elements including transposases and transposons. Transposases can include integrases from retrotransposons or of retroviral origin, as well as an enzyme that is a component of a functional nucleic acid-protein complex capable of transposition and which is mediating transposition. A transposition reaction includes a transposon and a transposase or an integrase enzyme. In particular embodiments, the efficiency of integration, the size of the DNA sequence that can be integrated, and the number of copies of a DNA sequence that can be integrated into a genome can be improved by using such transposable elements. Transposons include a short nucleic acid sequence with terminal repeat sequences upstream and downstream of a larger segment of DNA. Transposases bind the terminal repeat sequences and catalyze the movement of the transposon to another portion of the genome.

[0265] A number of transposases have been described in the art that facilitate insertion of nucleic acids into the genome of vertebrates, including humans. Examples of such transposases include sleeping beauty (“SB”, e.g., derived from the genome of salmonid fish); piggyback (e.g., derived from lepidopteran cells and/or the Myotis lucifugus); mariner (e.g., derived from Drosophila); frog prince (e.g., derived from Rana pipiens); Tol1; Tol2 (e.g., derived from medaka fish); TcBuster (e.g., derived from the red flour beetle Tribolium castaneum), Helraiser, Himarl, Passport, Minos, Ac/Ds, PIF, Harbinger, Harbinger3-DR, HSmarl, and spinON.

[0266] The PiggyBac (PB) transposase is a compact functional transposase protein that is described in, for example, Fraser et al., Insect Mol. Biol., 1996, 5, 141-51; Mitra et al., EMBO J., 2008, 27, 1097-1109; Ding et al., Cell, 2005, 122, 473-83; and U.S. Pat. Nos. 6,218,185; 6,551,825; 6,962,810; 7,105,343; and 7,932,088. Hyperactive piggyBac transposases are described in U.S. Pat. No. 10,131,885.

[0267] Additional information on DNA transposons can be found, for instance, in Muñoz-Lopez & Garcia Perez, Curr Genomics, 11(2):115-128, 2010.

[0268] Sleeping Beauty is described in Ivies et al. Cell 91, 501-510, 1997; Izsvak et al., J. Mol. Biol., 302(1):93-102, 2000; Geurts et al., Molecular Therapy, 8(1): 108-117, 2003; Mates et al. Nature Genetics 41:753-761, 2009; and U.S. Pat. Nos. 6,489,458; 7,148,203; and 7,160,682; US Publication Nos. 2011/117072; 2004/077572; and 2006/252140. In certain embodiments, the Sleeping Beauty transposase enzyme is a Hyperactive Sleeping Beauty SB100x transposase enzyme. SB transposons are most efficiently transposed when present in circularized nucleic acid molecules (Yant et al., Nature Biotechnology, 20: 999-1005, 2002).

[0269] Systematic mutagenesis studies have been undertaken to increase the activity of the SB transposase. For example, Yant et al., undertook the systematic exchange of the N-terminal 95 AA of the SB transposase for alanine (Mol. Cell Biol. 24: 9239-9247, 2004). Ten of these substitutions caused hyperactivity between 200-400% as compared to SB10 as a reference. SB16, described in Baus et al. (Mol. Therapy 12: 1148-1156, 2005) was reported to have a 16-fold activity increase as compared to SB10. Additional hyperactive SB variants are described in Zayed et al. (Molecular Therapy 9(2):292-304, 2004) and U.S. Pat. No. 9,840,696.

[0270] SB transposases transpose nucleic acid transposon payloads that are positioned between SB ITRs. Various SB ITRs are known in the art. In some embodiments, an SB ITR is a 230 bp sequence including imperfect direct repeats of 32 bp in length that serve as recognition signals for the transposase.

[0271] In various embodiments, an Ad3, 7, 11, 14, 16, 21, 34, 37, or 50 donor vector or genome includes a payload that includes SB100x transposon inverted repeats that flank an integration element that includes at least one coding sequence that encodes a 0-globin expression product or a γ-globin expression product.

[0272] In various embodiments, an adenoviral transposition system includes an Ad3, 7, 11, 14, 16, 21, 34, 37, or 50 donor vector or genome that includes an integration element flanked by transposon inverted repeats, and can further include an adenoviral support vector or support genome. In various embodiments, a support vector includes (i) the adenoviral capsid; and (ii) an adenoviral support genome including a nucleic acid sequence encoding a transposase that corresponds to the inverted repeats that flank the integration element. Accordingly, in various embodiments, at least one function of a support vector or support genome can be to encode, express, and/or deliver to a target cell a transposase for transposition of an integration element present in a donor vector administered to the target cell. For instance, in some embodiments, an Ad3, 7, 11, 14, 16, 21, 34, 37, or 50 donor vector or genome includes SB100x transposon inverted repeats that flank an integration element that includes at least one coding sequence that encodes a β-globin expression product or a γ-globin expression product, and a support vector or support genome includes a coding sequence that encodes SB100x transposase. In certain embodiments, an integration element is flanked by recombinase direct repeats, e.g., where the integration element is flanked by transposon inverted repeats and the transposon inverted repeats are flanked by recombinase direct repeats. In certain such embodiments, at least one function of a support vector or support genome can be to encode, express, and/or deliver to a target cell a recombinase for recombination of recombinase sites present in a donor vector administered to the target cell. In various embodiments, a support vector or support genome can encode, express, and/or deliver to a target cell a recombinase for recombination of recombinase sites present in a donor vector administered to the target cell and also encode, express, and/or deliver to a target cell a transposase for transposition of an integration element present in a donor vector administered to the target cell.

[0273] Particular embodiments disclosed herein also use site-specific recombinase systems. In these embodiments, in addition to at least one therapeutic gene, the transposon including transposase-recognized inverted repeats also includes at least one recombinase-recognized site. Thus, in particular embodiments, The present disclosure also provides methods of integrating a therapeutic gene into the genome including administering: (a) a transposon including the therapeutic gene, wherein the therapeutic gene is flanked by (i) an inverted repeat sequence recognized by a transposase and (ii) a recombinase-recognized site; and b) a transposase and recombinase that serve to excise the therapeutic gene from a plasmid, episome, or transgene and integrate the therapeutic gene into the genome. In some embodiments, the protein(s) of (b) are administered as a nucleic acid encoding the protein(s). In some embodiments, the transposon and the nucleic acids encoding the protein(s) of (b) are present on separate vectors. In some embodiments, the transposon and nucleic acid encoding the protein(s) of (b) are present on the same vector. When present on the same vector, the portion of the vector encoding the protein(s) of (b) are located outside the portion carrying the transposon of (a). In other words, the transposase and/or recombinase encoding region is located external to the region flanked by the inverted repeats and/or recombinase-recognition site. In the aforementioned methods, the transposase protein recognizes the inverted repeats that flank an inserted nucleic acid, such as a nucleic acid that is to be inserted into a target cell genome. The use of recombinases and recombinase-recognized sites can increase the size of a transposon that can be integrated into a genome further.

[0274] Examples of recombinase systems include the Flp/Frt system, the Cre/loxP system, the Dre/rox system, the Vika/vox system, and the PhiC31 system. The Flp/Frt DNA recombinase system was isolated from Saccharomyces cerevisiae. The Flp/Frt system includes the recombinase Flp (flippase) that catalyzes DNA-recombination on its Frt recognition sites. Variants of the Flp protein include GenBank: ABD57356.1) and GenBank: ANW61888.1.

[0275] The Cre/loxP system is described in, for example, EP 02200009B1. Cre is a site-specific DNA recombinase isolated from bacteriophage P1. The recognition site of the Cre protein is a nucleotide sequence of 34 base pairs, the loxP site. Cre recombines the 34 bp loxP DNA sequence by binding to the 13 base pair inverted repeats and catalyzing strand cleavage and re-ligation within the spacer region. The staggered DNA cuts made by Cre in the spacer region are separated by 6 base pairs to give an overlap region that acts as a homology sensor to ensure that only recombination sites having the same overlap region recombine. Variants of the lox recognition site that can also be used include: lox2272; lox511; lox66; lox71; loxM2; and 1ox5171. The VCre/VloxP recombinase system was isolated from Vibrio plasmid p0908. The sCre/SloxP system is described in WO 2010/143606. The Dre/rox system is described in U.S. Pat. Nos. 7,422,889 and 7,915,037B2. It generally includes a Dre recombinase isolated from Enterobacteria phage D6 and the rox recognition site. The Vika/vox system is described in U.S. Pat. No. 10,253,332. Additionally, the PhiC31 recombinase recognizes the AttB/AttP binding sites.

[0276] The amount of vector nucleic acid including the transposon (including inverted repeats and/or recombinase recognition sites), and in various embodiments the amount of vector nucleic acid encoding the transposase and/or recombinase, introduced into the cell is/are sufficient to provide for the desired excision and insertion of the transposon nucleic acid into the target cell genome. As such, the amount of vector nucleic acid introduced should provide for a sufficient amount of transposase activity and/or recombinase activity and a sufficient copy number of the transposon that is desired to be inserted into the target cell genome. Particular embodiments include a 1:1; 1:2; or 1:3 ratio of transposon to transposase/recombinase.

[0277] The subject methods result in stable integration of the nucleic acid into the target cell genome. By stable integration is meant that the nucleic acid remains present in the target cell genome for more than a transient period of time and passes on a part of the chromosomal genetic material to the progeny of the target cell.

[0278] As indicated previously, particular embodiments utilize homology arms to facilitate targeted insertion of genetic constructs utilizing homology directed repair. Homology arms can be any length with sufficient homology to a genomic sequence at a cleavage site, e.g. 70%, 80%, 85%, 90%, 95%, or 100% homology with the nucleotide sequences flanking the cleavage site, e.g., within 50 bases or less of the cleavage site, e.g., within 30 bases, within 15 bases, within 10 bases, within 5 bases, or immediately flanking the cleavage site, to support HDR between it and the genomic sequence to which it bears homology. Homology arms are generally identical to the genomic sequence, for example, to the genomic region in which the double stranded break (DSB) occurs. However, as indicated, absolute identity is not required.

[0279] Particular embodiments can utilize homology arms with 25, 50, 100, or 200 nucleotides (nt), or more than 200 nt of sequence homology between a homology-directed repair template and a targeted genomic sequence (or any integral value between 10 and 200 nucleotides, or more). In particular embodiments, homology arms are 40-1000 nt in length. In particular embodiments, homology arms are 500-2500 base pairs, 700-2000 base pairs, or 800-1800 base pairs. In particular embodiments, homology arms include at least 800 base pairs or at least 850 base pairs. The length of homology arms can also be symmetric or asymmetric.

[0280] Particular embodiment can utilize first and/or second homology arms each including at least 25, 50, 100, 200, 400, 600, 800, 1,000, 1,200, 1,400, 1,600, 1,800, 2,000, 2,500, or 3,000 nucleotides or more, having sequence identity or homology with a corresponding fragment of a target genome. In some embodiments, first and/or second homology arms each include a number of nucleotides having sequence identity or homology with a corresponding fragment of a target genome that has a lower bound of 25, 50, 100, 200, 400, 600, 800, 1,000, 1,200, 1,400, 1,600, or 1,800 nucleotides and an upper bound of 1,000, 1,200, 1,400, 1,600, 1,800, 2,000, 2,500, or 3,000 nucleotides. In some embodiments, first and/or second homology arms each include a number of nucleotides having sequence identity or homology with a corresponding fragment of a target genome that is between 40 and 1,000 nucleotides, between 500 and 2,500 nucleotides, between 700 and 2,000 nucleotides, or between 800 and 1800 nucleotides, or that has a length of at least 800 nucleotides or at least 850 nucleotides. First and second homology arms can have same, similar, or different lengths.

[0281] For additional information regarding homology arms, see Richardson et al., Nat Biotechnol. 34(3):339-44, 2016.

[0282] In particular embodiments, genetic constructs (e.g., genes leading to expression of a therapeutic product within a cell) are precisely inserted within genomic safe harbors. Genomic safe harbor sites are intragenic or extragenic regions of the genome that are able to accommodate the predictable expression of newly integrated DNA without adverse effects on the host cell. A useful safe harbor must permit sufficient transgene expression to yield desired levels of the encoded protein. A genomic safe harbor site also must not alter cellular functions. Methods for identifying genomic safe harbor sites are described in Sadelain et al., Nature Reviews 12:51-58, 2012; and Papapetrou et al., Nat Biotechnol. 29(1):73-8, 2011. In particular embodiments, a genomic safe harbor site meets one or more (one, two, three, four, or five) of the following criteria: (i) distance of at least 50 kb from the 5′ end of any gene, (ii) distance of at least 300 kb from any cancer-related gene, (iii) within an open/accessible chromatin structure (measured by DNA cleavage with natural or engineered nucleases), (iv) location outside a gene transcription unit and (v) location outside ultraconserved regions (UCRs), microRNA or long non-coding RNA of the genome.

[0283] In particular embodiments, to meet the criteria of a genomic safe harbor, chromatin sites must be >150 kb away from a known oncogene, >30 kb away from a known transcription start site; and have no overlap with coding mRNA. In particular embodiments, to meet the criteria of a genomic safe harbor, chromatin sites must be >200 kb away from a known oncogene, >40 kb away from a known transcription start site; and have no overlap with coding mRNA. In particular embodiments, to meet the criteria of a genomic safe harbor, chromatin sites must be >300 kb away from a known oncogene, >50 kb away from a known transcription start site; and have no overlap with coding mRNA. In particular embodiments, a genomic safe harbor meets the preceding criteria (>150 kb, >200 kb or >300 kb away from a known transcription start site; and have no overlap with coding mRNA >40 kb, or >50 kb away from a known transcription start site with no overlap with coding mRNA) and additionally is 100% homologous between an animal of a relevant animal model and the human genome to permit rapid clinical translation of relevant findings.

[0284] In particular embodiments, a genomic safe harbor meets criteria described herein and also demonstrates a 1:1 ratio of forward:reverse orientations of lentiviral integration further demonstrating the locus does not impact surrounding genetic material.

[0285] Particular genomic safe harbors sites include CCR5, HPRT, AAVS1, Rosa and albumin. See also, e.g., U.S. Pat. Nos. 7,951,925 and 8,110,379; U.S. Publication Nos. 2008/0159996; 2010/00218264; 2012/0017290; 2011/0265198; 2013/0137104; 2013/0122591; 2013/0177983 and 2013/0177960 for additional information and options for appropriate genomic safe harbor integration sites.

[0286] Various technologies known in the art can be used to direct integration of an integration element at specific genomic loci such as genomic safe harbors. For example AAV-mediated gene targeting, as well as homologous recombination enhanced by the introduction of DNA double-strand breaks using site-specific endonucleases (zinc-finger nucleases, meganucleases, transcription activator-like effector (TALE) nucleases), and CRISPR/Cas systems are all tools that can mediate targeted insertion of foreign DNA at predetermined genomic loci such as genomic safe harbors.

[0287] In certain embodiments, integration of an integration element at specific genomic loci such as genomic safe harbors can include homology-directed integration using CRISPR enzyme-mediated cleavage of a target genome. CRISPR enzyme (e.g., Cas9) cleaves double stranded DNA at a site specified by a guide RNA (gRNA). The double strand break can be repaired by homology-directed repair (HDR) when a donor template (such as an Ad3, 7, 11, 14, 16, 21, 34, 37, or 50 payload integration element including left and right homology arms) is present. In various such methods, an integration element is a “repair template” in that it includes left and right homology arms (e.g., of 500-3,000 bp) for insertion into a cleaved target genome. CRISPR-mediated gene insertion can be several orders of magnitude more efficient compared with spontaneous recombination of DNA template, demonstrating that CRISPR-mediated gene insertion can be an effective tool for genome editing. Exemplary methods of homology-directed integration of a nucleic acid sequence into a specified genomic locus are known in the art, e.g., in Richardson et al. (Nat Biotechnol. 34(3):339-44, 2016).

### II. Target Cell Populations

[0288] In various embodiments, donor vectors and genomes of the present disclosure can transduce hematopoietic stem cells (HSCs). HSCs can be targeted for in vivo genetic modification by binding CD46. HSCs or subsets thereof can also be identified by any of the following marker profiles: CD34+; Lin−/CD34+/CD38−/CD45RA−/CD90+/CD49f+(HSC1); CD34+/CD38−/CD45RA−/CD90−/CD49f+/(HSC2). In various embodiments, human HSC1 can be identified by any of the following profiles: CD34+/CD38−/CD45RA−/CD90+ or CD34+/CD45RA−/CD90+ and mouse LT-HSC can be identified by Lin−/Scal+/ckit+/CD150+/CD48−/Flt3−/CD34− (where Lin represents the absence of expression of any marker of mature cells including CD3, Cd4, CD8, CD11b, CD11c, NK1.1, Gr1, and TER119). In particular embodiments, HSC are identified by a CD164+ profile. In particular embodiments, HSC are identified by a CD34+/CD164+ profile. For additional information regarding HSC marker profiles, see WO2017/218948.

[0289] For the avoidance of doubt, in various embodiments, donor vectors and genomes of the present disclosure can infect and/or transduce CD34+ hematopoietic cells. In various embodiments, donor vectors and genomes of the present disclosure can infect and/or transduce CD34+/CD90+ cells. In various embodiments, CD34+ cells and/or a CD34+ phenotype can refer to cells found to express CD34+, e.g., based on binding of cells with a labelled anti-CD34 antibody, e.g., as set forth in Example 6 and/or FIG. 33. In various embodiments, CD90+ cells and/or a CD90+ phenotype can refer to cells found to express CD90+, e.g., based on binding of cells with a labelled anti-CD90 antibody, e.g., as set forth in Example 6 and/or FIG. 33. In various embodiments, CD34+ cells and/or a CD34+ phenotype can refer to cells in sample or population that are most robustly labeled by a label directed to CD34+(e.g., most robustly labeled by a labelled anti-CD34 antibody). For example, in various embodiments in which a sample or population includes cells labeled by a label directed to CD34+, CD34+ cells and/or a CD34+ phenotype can refer to (i) all the cells that are labeled by a label directed to CD34%, or can refer to (ii) the 99%, 98%, 97%, 96%, 95%, 90%, 85%, 80%, 75%, 70%, 65%, 60%, 55%, 50%, 45%, 40%, 35%, 30%, 25%, 20%, 15%, 10%, 5%, 4%, 3%, 2%, or 1% of cells that are most robustly labeled by a label directed to CD34, which CD34+ cells can optionally be referred to as CD34+high cells. In various embodiments, labeling and/or robustness of labeling can be determined by any of a variety of methods known in the art, including without limitation by relative presence of a label, such as fluorescence of a fluorescence label. In various embodiments, labeling and/or robustness of labeling can be measured by techniques including methods such as fluorescence-activated cell sorting (FACS). Accordingly, in various embodiments, CD34+/CD90+ cells can refer to a population of cells that are (i) CD34+ cells and/or determined to have a CD34+ phenotype and are (ii) CD90+ cells and/or determined to have a CD90+ phenotype. In various embodiments, CD34+/CD90+ cells can refer to a population of CD34+high/CD90+ cells that are (i) CD34+high cells and/or determined to have a CD34+high phenotype and are (ii) CD90+ cells and/or determined to have a CD90+ phenotype. In various such embodiments, the cells can be hematopoietic cells. In various embodiments, the cells can be CD45RA−. In various embodiments, the cells can be CD45RA+.

[0290] Without wishing to be bound by any particular scientific theory, the present disclosure includes that expression of CD34+(e.g., labeling and/or robustness of labeling of CD34) can correlate with CD46 expression and/or with susceptibility to infection and/or transduction by vectors of the present disclosure, e.g., in hematopoietic cells. Without wishing to be bound by any particular scientific theory, the present disclosure includes that vectors disclosed herein are particularly advantageous in infecting and/or transducing CD34+ cells, CD34+high cells, CD34+/CD90+ cells, and/or CD34+high/CD90+ cells (e.g., can selectively infect and/or transduce CD34+ cells, CD34+high cells, CD34+/CD90+ cells, and/or CD34+high/CD90+ cells), e.g., where the cells are hematopoietic cells.

[0291] HSCs can be beneficially caused to encode and/or express various payloads provided herein, including without limitation TCRs and CARs (see, e.g., Gschweng et al. Immunol Rev. 2014 January; 257(1): 237-249).

### III. Dosages, Formulations, and Administration

[0292] A vector can be formulated such that it is pharmaceutically acceptable for administration to cells or animals, e.g., to humans. A vector may be administered in vitro, ex vivo, or in vivo. The adenoviral vectors described herein can be formulated for administration to a subject. Formulations include an adenoviral vector encoding a therapeutic agent and one or more pharmaceutically acceptable carriers.

[0293] As disclosed herein, a vector can be in any form known in the art. Such forms include, e.g., liquid, semi-solid and solid dosage forms, such as liquid solutions (e.g., injectable and infusible solutions), dispersions or suspensions, tablets, pills, powders, liposomes and suppositories.

[0294] Selection or use of any particular form may depend, in part, on the intended mode of administration and therapeutic application. For example, compositions containing a composition intended for systemic or local delivery can be in the form of injectable or infusible solutions. Accordingly, a vector can be formulated for administration by a parenteral mode (e.g., intravenous, subcutaneous, intraperitoneal, or intramuscular injection). As used herein, parenteral administration refers to modes of administration other than enteral and topical administration, usually by injection, and include, without limitation, intravenous, intranasal, intraocular, pulmonary, intramuscular, intraarterial, intrathecal, intracapsular, intraorbital, intracardiac, intradermal, intrapulmonary, intraperitoneal, transtracheal, subcutaneous, subcuticular, intraarticular, subcapsular, subarachnoid, intraspinal, epidural, intracerebral, intracranial, intracarotid and intracisternal injection and infusion. A parenteral route of administration can be, for example, administration by injection, transnasal administration, transpulmonary administration, or transcutaneous administration. Administration can be systemic or local by intravenous injection, intramuscular injection, intraperitoneal injection, subcutaneous injection.

[0295] In various embodiments, a vector of the present invention can be formulated as a solution, microemulsion, dispersion, liposome, or other ordered structure suitable for stable storage at high concentration. Sterile injectable solutions can be prepared by incorporating a composition described herein in the required amount in an appropriate solvent with one or a combination of ingredients enumerated above, as required, followed by filter sterilization. Generally, dispersions are prepared by incorporating a composition described herein into a sterile vehicle that contains a basic dispersion medium and the required other ingredients from those enumerated above. In the case of sterile powders for the preparation of sterile injectable solutions, methods for preparation include vacuum drying and freeze-drying that yield a powder of a composition described herein plus any additional desired ingredient (see below) from a previously sterile-filtered solution thereof. The proper fluidity of a solution can be maintained, for example, by the use of a coating such as lecithin, by the maintenance of the required particle size in the case of dispersion and by the use of surfactants. Prolonged absorption of injectable compositions can be brought about by including in the composition a reagent that delays absorption, for example, monostearate salts, and gelatin.

[0296] A vector can be administered parenterally in the form of an injectable formulation including a sterile solution or suspension in water or another pharmaceutically acceptable liquid. For example, the vector can be formulated by suitably combining the therapeutic molecule with pharmaceutically acceptable vehicles or media, such as sterile water and physiological saline, vegetable oil, emulsifier, suspension agent, surfactant, stabilizer, flavoring excipient, diluent, vehicle, preservative, binder, followed by mixing in a unit dose form required for generally accepted pharmaceutical practices. The amount of vector included in the pharmaceutical preparations is such that a suitable dose within the designated range is provided. Nonlimiting examples of oily liquid include sesame oil and soybean oil, and it may be combined with benzyl benzoate or benzyl alcohol as a solubilizing agent. Other items that may be included are a buffer such as a phosphate buffer, or sodium acetate buffer, a soothing agent such as procaine hydrochloride, a stabilizer such as benzyl alcohol or phenol, and an antioxidant. The formulated injection can be packaged in a suitable ampule.

[0297] In various embodiments, subcutaneous administration can be accomplished by means of a device, such as a syringe, a prefilled syringe, an auto-injector (e.g., disposable or reusable), a pen injector, a patch injector, a wearable injector, an ambulatory syringe infusion pump with subcutaneous infusion sets, or other device for subcutaneous injection.

[0298] In some embodiments, a vector described herein can be therapeutically delivered to a subject by way of local administration. As used herein, “local administration” or “local delivery,” can refer to delivery that does not rely upon transport of the vector or vector to its intended target tissue or site via the vascular system. For example, the vector may be delivered by injection or implantation of the composition or agent or by injection or implantation of a device containing the composition or agent. In certain embodiments, following local administration in the vicinity of a target tissue or site, the composition or agent, or one or more components thereof, may diffuse to an intended target tissue or site that is not the site of administration.

[0299] In some embodiments, compositions provided herein are present in unit dosage form, which unit dosage form can be suitable for self-administration. Such a unit dosage form may be provided within a container, typically, for example, a vial, cartridge, prefilled syringe or disposable pen. A doser such as the doser device described in U.S. Pat. No. 6,302,855, may also be used, for example, with an injection system as described herein.

[0300] Pharmaceutical forms of vector formulations suitable for injection can include sterile aqueous solutions or dispersions. A formulation can be sterile and must be fluid to allow proper flow in and out of a syringe. A formulation can also be stable under the conditions of manufacture and storage. A carrier can be a solvent or dispersion medium containing, for example, water and saline or buffered aqueous solutions. Preferably, isotonic agents, for example, sugars or sodium chloride can be used in the formulations.

[0301] A suitable dose of a vector described herein can depend on a variety of factors including, e.g., the age, sex, and weight of a subject to be treated, the condition or disease to be treated, and the particular vector used. Other factors affecting the dose administered to the subject include, e.g., the type or severity of the condition or disease. Other factors can include, e.g., other medical disorders concurrently or previously affecting the subject, the general health of the subject, the genetic disposition of the subject, diet, time of administration, rate of excretion, drug combination, and any other additional therapeutics that are administered to the subject. A suitable means of administration of a vector can be selected based on the condition or disease to be treated and upon the age and condition of a subject. Dose and method of administration can vary depending on the weight, age, condition, and the like of a patient, and can be suitably selected as needed by those skilled in the art. A specific dosage and treatment regimen for any particular subject can be adjusted based on the judgment of a medical practitioner.

[0302] In various instances, a vector can be formulated to include a pharmaceutically acceptable carrier or excipient. Examples of pharmaceutically acceptable carriers include, without limitation, any and all solvents, dispersion media, coatings, antibacterial and antifungal agents, isotonic and absorption delaying agents, and the like that are physiologically compatible. Compositions of the present invention can include a pharmaceutically acceptable salt, e.g., an acid addition salt or a base addition salt.

[0303] Exemplary generally used pharmaceutically acceptable carriers include any and all absorption delaying agents, antioxidants, binders, buffering agents, bulking agents or fillers, chelating agents, coatings, disintegration agents, dispersion media, gels, isotonic agents, lubricants, preservatives, salts, solvents or co-solvents, stabilizers, surfactants, and/or delivery vehicles.

[0304] In various embodiments, a composition including a vector as described herein, e.g., a sterile formulation for injection, can be formulated in accordance with conventional pharmaceutical practices using distilled water for injection as a vehicle. For example, physiological saline or an isotonic solution containing glucose and other supplements such as D-sorbitol, D-mannose, D-mannitol, and sodium chloride may be used as an aqueous solution for injection, optionally in combination with a suitable solubilizing agent, for example, alcohol such as ethanol and polyalcohol such as propylene glycol or polyethylene glycol, and a nonionic surfactant such as polysorbate 80™, HCO-50 and the like.

[0305] The formulations disclosed herein can be formulated for administration by, for example, injection. For injection, formulation can be formulated as aqueous solutions, such as in buffers including Hanks' solution, Ringer's solution, or physiological saline, or in culture media, such as Iscove's Modified Dulbecco's Medium (IMDM). The aqueous solutions can include formulatory agents such as suspending, stabilizing, and/or dispersing agents. Alternatively, the formulation can be in lyophilized and/or powder form for constitution with a suitable vehicle, e.g., sterile pyrogen-free water, before use.

[0306] Any formulation disclosed herein can advantageously include any other pharmaceutically acceptable carriers which include those that do not produce significantly adverse, allergic, or other untoward reactions that outweigh the benefit of administration. Exemplary pharmaceutically acceptable carriers and formulations are disclosed in Remington's Pharmaceutical Sciences, 18th Ed. Mack Printing Company, 1990. Moreover, formulations can be prepared to meet sterility, pyrogenicity, general safety, and purity standards as required by US FDA Office of Biological Standards and/or other relevant foreign regulatory agencies.

[0307] Therapeutically effective amounts of adenoviral vector associated with a therapeutic gene can include doses ranging from, for example, 1×10⁷ to 50×10⁸ infection units (IU) or from 5×10⁷ to 20×10⁸ IU. In other examples, a dose can include 5×10⁷ IU, 6×10⁷ IU, 7×10⁷ IU, 8×10⁷ IU, 9×10⁷ IU, 1×10⁸ IU, 2×10⁸ IU, 3×10⁸ IU, 4×10⁸ IU, 5×10⁸ IU, 6×10⁸ IU, 7×10⁸ IU, 8×10⁸ IU, 9×10⁸ IU, 10×10⁸ IU, or more. In particular embodiments, a therapeutically effective amount of an adenoviral vector associated with a therapeutic gene includes 4×10⁸ IU. In particular embodiments, a therapeutically effective amount of an adenoviral vector associated with a therapeutic gene can be administered subcutaneously or intravenously. In particular embodiments, a therapeutically effective amount of an adenoviral vector associated with a therapeutic gene can be administered following administration with one or more mobilization factors.

[0308] In various embodiments of the present disclosure, an in vivo gene therapy includes administration of at least one viral gene therapy vector to a subject in combination with at least one immune suppression regimen. In an in vivo gene therapy including more than one vector species, such as a first vector that is a supported viral gene therapy vector in combination with a second vector that is a support vector, the first vector and the second vector can be administered in a single formulation or dosage form or in two separate formulations or dosage forms. In various embodiments, the first and second vectors can be administered at the same time or at different times, e.g., during the same one-hour period or during non-overlapping one-hour periods. In various embodiments, the first and second vectors can be administered at the same time or at different times, e.g., on the same day or on different days. In various embodiments, the first and second vectors can be administered at the same dosage or at different dosages, e.g., where the dosage is measured as the total number of viral particles or as a number of viral particles per kilogram of the subject. In various embodiments, the first and second vectors can be administered in a pre-defined ratio. In various embodiments, the ratio is in the range of 2:1 to 1:2, e.g., 1:1.

[0309] In various embodiments, a vector is administered to a subject in a single total dose on a single day. In various embodiments a vector is administered in two, three, four, or more unit doses that together constitute a total dose. In various embodiments, one unit dose of a vector is administered to a subject per day on each of one, two, three, four, or more consecutive days. In various embodiments, two unit doses of a vector are administered to a subject per day on each of one, two, three, four, or more consecutive days. Accordingly, in various embodiments, a daily dose can refer to the dose of vector received by a subject over the course of a day. In various embodiments, the term day refers to a twenty-four-hour period, such as a twenty-four-hour period from midnight of a first calendar date to midnight of the next calendar date.

[0310] In various embodiments, a unit dose, daily dose, or total dose of a vector, such as a viral gene therapy vector or support vector, or the total combined dose of a viral gene therapy vector and a support vector, can be at least 1E8, 5E8, 1E9, 5E9, 1E10, 5E10, 1E11, 5E11, 1E12, 5E12, 1E13, 5E13, 1E14, or 1E15 viral particles per kilogram (vp/kg). In various embodiments, a unit dose, daily dose, or total dose of a vector, such as a viral gene therapy vector or support vector, or the total combined dose of a viral gene therapy vector and a support vector, can fall within a range having a lower bound selected from 1E8, 5E8, 1E9, 5E9, 1E10, 5E10, 1E11, 5E11, 1E12, 5E12, 1E13, 5E13, 1E14, or 1E15 vp/kg and an upper bound selected from 1E8, 5E8, 1E9, 5E9, 1E10, 5E10, 1E11, 5E11, 1E12, 5E12, 1E13, 5E13, 1E14, or 1E15 vp/kg.

[0311] In various embodiments, a viral gene therapy vector is administered at a unit dose, daily dose, or total dose of at least 1E10, 5E10, 1E11, 5E11, 1E12, 5E12, 1E13, 5E13, 1E14, or 1E15 vp/kg and a support vector is administered at a unit dose, daily dose, or total dose of at least 1E8, 5E8, 1E9, 5E9, 1E10, 5E10, 1E11, and 5E11 vp/kg, optionally where the unit dose, daily dose, or total dose of the viral gene therapy vector is within a range having a lower bound selected from 1E10, 5E10, 1E11, 5E11, 1E12, and 5E12, vp/kg and an upper bound selected from 1E11, 5E11, 1E12, 5E12, 1E13, 5E13, 1E14, and 1E15 vp/kg, and/or where the unit dose, daily dose, or total dose of the support vector is within a range having a lower bound selected from 1E8, 5E8, 1E9, 5E9, 1E10, and 5E10 vp/kg and an upper bound selected from 1E9, 5E9, 1E10, 5E10, 1E11, and 5E11 vp/kg.

[0312] In various embodiments, a support vector is administered at a unit dose, daily dose, or total dose of at least 1E10, 5E10, 1E11, 5E11, 1E12, 5E12, 1E13, 5E13, 1E14, or 1E15 vp/kg and a supported viral gene therapy vector is administered at a unit dose, daily dose, or total dose of at least 1E8, 5E8, 1E9, 5E9, 1E10, 5E10, 1E11, and 5E11 vp/kg, optionally where the unit dose, daily dose, or total dose of the support vector is within a range having a lower bound selected from 1E10, 5E10, 1E11, 5E11, 1E12, and 5E12, vp/kg and an upper bound selected from 1E11, 5E11, 1E12, 5E12, 1E13, 5E13, 1E14, and 1E15 vp/kg, and/or where the unit dose, daily dose, or total dose of the supported viral gene therapy vector is within a range having a lower bound selected from 1E8, 5E8, 1E9, 5E9, 1E10, and 5E10 vp/kg and an upper bound selected from 1E9, 5E9, 1E10, 5E10, 1E11, and 5E11 vp/kg. In various embodiments, a supported viral gene therapy vector and a support vector are administered in a pre-defined ratio. In various embodiments, the ratio is in the range of 2:1 to 1:2, e.g., 1:1.

### IV. Applications

[0313] Methods and compositions provided herein are disclosed at least in part for use in in vivo gene therapy. However, for the avoidance of doubt, the present disclosure expressly includes the use of compositions and methods provided herein for ex-vivo engineering of cells and/or tissues, as well as in vitro uses including the engineering of cells and/or tissues for research purposes. Gene therapy includes use of a vector, genome, or system of the present disclosure in a method of introducing exogenous DNA into a host cell (such as a target cell) and/or a nucleic acid (such as a target nucleic acid, such as a target genome, e.g., the genome of a target cell). The present disclosure includes description and exemplification of compositions and methods relating to in vivo, in vitro, and ex vivo therapy and those of skill in the art will appreciate that various methods and compositions provided herein are generally applicable to introduction of a nucleic acid payload into a subject, e.g., a host or target cell. Because such compositions and methods are of general utility, e.g., in gene therapy, they are useful both as tools in gene therapy in general and in various particular conditions, including those provided herein.

### IV(A). In Vivo Gene Therapy

[0314] Treatments using in VIVO gene therapy, which includes the direct delivery of a viral vector to a patient, have been explored. In vivo gene therapy is an attractive approach because it may not require any genotoxic conditioning (or could require less genotoxic conditioning) nor ex vivo cell processing and thus could be adopted at many institutions worldwide, including those in developing countries, as the therapy could be administered through an injection, similar to what is already done worldwide for the delivery of vaccines. In various embodiments methods of in vivo gene therapy with adenoviral vectors of the present disclosure can include one or more steps of (i) target cell mobilization, (ii) immunosuppression, (iii) administration of a vector, genome, system or formulation provided herein, and/or (iv) selection of transduced cells and/or cells that have integrated an integration element of a payload of an adenoviral vector or genome.

[0315] The adenoviral vector formulations disclosed herein can be used for treating subjects (humans, veterinary animals (dogs, cats, reptiles, birds, etc.), livestock (horses, cattle, goats, pigs, chickens, etc.), and research animals (monkeys, rats, mice, fish, etc.). Treating subjects includes delivering therapeutically effective amounts of one or more vectors, genomes, or systems of the present disclosure. Therapeutically effective amounts include those that provide effective amounts, prophylactic treatments, and/or therapeutic treatments.

[0316] Vectors described herein can be administered in coordination with mobilization factors. In certain embodiments, adenoviral vector formulations described herein can be administered in concert with HSPC mobilization. In particular embodiments, administration of adenoviral donor vector occurs concurrently with administration of one or more mobilization factors. In particular embodiments, administration of adenoviral donor vector follows administration of one or more mobilization factors. In particular embodiments, administration of adenoviral donor vector follows administration of a first one or more mobilization factors and occurs concurrently with administration of a second one or more mobilization factors. Agents for HSPC mobilization include, for example, granulocyte-colony stimulating factor (G-CSF), granulocyte macrophage colony stimulating factor (GM-CSF), AMD3100, SCF, S-CSF, a CXCR4 antagonist, a CXCR2 agonist, and Gro-Beta (GRO-β). In various embodiments, a CXCR4 antagonist is AMD3100 and/or a CXCR2 agonist is GRO-β.

[0317] G-CSF is a cytokine whose functions in HSPC mobilization can include the promotion of granulocyte expansion and both protease-dependent and independent attenuation of adhesion molecules and disruption of the SDF-1/CXCR4 axis. In particular embodiments, any commercially available form of G-CSF known to one of ordinary skill in the art can be used in the methods and formulations as disclosed herein, for example, Filgrastim (Neupogen®, Amgen Inc., Thousand Oaks, CA) and PEGylated Filgrastim (Pegfilgrastim, NEULASTA®, Amgen Inc., Thousand Oaks, CA).

[0318] GM-CSF is a monomeric glycoprotein also known as colony-stimulating factor 2 (CSF2) that functions as a cytokine and is naturally secreted by macrophages, T cells, mast cells, natural killer cells, endothelial cells, and fibroblasts. In particular embodiments, any commercially available form of GM-CSF known to one of ordinary skill in the art can be used in the methods and formulations as disclosed herein, for example, Sargramostim (Leukine, Bayer Healthcare Pharmaceuticals, Seattle, WA) and molgramostim (Schering-Plough, Kenilworth, NJ).

[0319] AMD3100 (MOZOBIL™, PLERIXAFOR™; Sanofi-Aventis, Paris, France), a synthetic organic molecule of the bicyclam class, is a chemokine receptor antagonist and reversibly inhibits SDF-1 binding to CXCR4, promoting HSPC mobilization. AMD3100 is approved to be used in combination with G-CSF for HSPC mobilization in patients with myeloma and lymphoma. The structure of AMD3100 is:

[chemical structure]

[0320] SCF, also known as KIT ligand, KL, or steel factor, is a cytokine that binds to the c-kit receptor (CD117). SCF can exist both as a transmembrane protein and a soluble protein. This cytokine plays an important role in hematopoiesis, spermatogenesis, and melanogenesis. In particular embodiments, any commercially available form of SCF known to one of ordinary skill in the art can be used in the methods and formulations as disclosed herein, for example, recombinant human SCF (Ancestim, STEMGEN®, Amgen Inc., Thousand Oaks, CA).

[0321] Chemotherapy used in intensive myelosuppressive treatments also mobilizes HSPCs to the peripheral blood as a result of compensatory neutrophil production following chemotherapy-induced aplasia. In particular embodiments, chemotherapeutic agents that can be used for mobilization of HSPCs include cyclophosphamide, etoposide, ifosfamide, cisplatin, and cytarabine.

[0322] Additional agents that can be used for cell mobilization include: CXCL12/CXCR4 modulators (e.g., CXCR4 antagonists: POL6326 (Polyphor, Allschwil, Switzerland), a synthetic cyclic peptide which reversibly inhibits CXCR4; BKT-140 (4F-benzoyl-TN14003; Biokine Therapeutics, Rehovit, Israel); TG-0054 (Taigen Biotechnology, Taipei, Taiwan); CXCL12 neutralizer NOX-A12 (NOXXON Pharma, Berlin, Germany) which binds to SDF-1, inhibiting its binding to CXCR4); Sphingosine-1-phosphate (SIP) agonists (e.g., SEW2871, Juarez et al. Blood 119: 707-716, 2012); vascular cell adhesion molecule-1 (VCAM) or very late antigen 4 (VLA-4) inhibitors (e.g., Natalizumab, a recombinant humanized monoclonal antibody against α4 subunit of VLA-4 (Zohren et al. Blood 111: 3893-3895, 2008); BI05192, a small molecule inhibitor of VLA-4 (Ramirez et al. Blood 114: 1340-1343, 2009)); parathyroid hormone (Brunner et al. Exp Hematol. 36: 1157-1166, 2008); proteasome inhibitors (e.g., Bortezomib, Ghobadi et al. ASH Annual Meeting Abstracts. p. 583, 2012); Groβ, a member of CXC chemokine family which stimulates chemotaxis and activation of neutrophils by binding to the CXCR2 receptor (e.g., SB-251353, King et al. Blood 97: 1534-1542, 2001); stabilization of hypoxia inducible factor (HIF) (e.g., FG-4497, Forristal et al. ASH Annual Meeting Abstracts. p. 216, 2012); Firategrast, an α4β1 and α4β7 integrin inhibitor (α4β1/7) (Kim et al. Blood 128: 2457-2461, 2016); Vedolizumab, a humanized monoclonal antibody against the α4β7 integrin (Rosario et al. Clin Drug Investig 36: 913-923, 2016); and BOP (N-(benzenesulfonyl)-L-prolyl-L-O-(1-pyrrolidinylcarbonyl) tyrosine) which targets integrins α9β1/α4β1 (Cao et al. Nat Commun 7: 11007, 2016). Additional agents that can be used for HSPC mobilization are described in, for example, Richter R et al. Transfus Med Hemother 44:151-164, 2017, Bendall & Bradstock, Cytokine & Growth Factor Reviews 25: 355-367, 2014, WO 2003043651, WO 2005017160, WO 2011069336, U.S. Pat. Nos. 5,637,323, 7,288,521, 9,782,429, US 2002/0142462, and US 2010/02268.

[0323] In particular embodiments, a therapeutically effective amount of G-CSF includes 0.1 μg/kg to 100 μg/kg. In particular embodiments, a therapeutically effective amount of G-CSF includes 0.5 μg/kg to 50 μg/kg. In particular embodiments, a therapeutically effective amount of G-CSF includes 0.5 μg/kg, 1 μg/kg, 2 μg/kg, 3 μg/kg, 4 μg/kg, 5 μg/kg, 6 μg/kg, 7 μg/kg, 8 μg/kg, 9 μg/kg, 10 μg/kg, 11 μg/kg, 12 μg/kg, 13 μg/kg, 14 μg/kg, 15 μg/kg, 16 μg/kg, 17 μg/kg, 18 μg/kg, 19 μg/kg, 20 μg/kg, or more. In particular embodiments, a therapeutically effective amount of G-CSF includes 5 μg/kg. In particular embodiments, G-CSF can be administered subcutaneously or intravenously. In particular embodiments, G-CSF can be administered for 1 day, 2 consecutive days, 3 consecutive days, 4 consecutive days, 5 consecutive days, or more. In particular embodiments, G-CSF can be administered for 4 consecutive days. In particular embodiments, G-CSF can be administered for 5 consecutive days. In particular embodiments, as a single agent, G-CSF can be used at a dose of 10 μg/kg subcutaneously daily, initiated 3, 4, 5, 6, 7, or 8 days before adenoviral delivery. In particular embodiments, G-CSF can be administered as a single agent followed by concurrent administration with another mobilization factor. In particular embodiments, G-CSF can be administered as a single agent followed by concurrent administration with AMD3100. In particular embodiments, a treatment protocol includes a 5 day treatment where G-CSF can be administered on day 1, day 2, day 3, and day 4 and on day 5, G-CSF and AMD3100 are administered 6 to 8 hours prior to adenoviral administration.

[0324] Therapeutically effective amounts of GM-CSF to administer can include doses ranging from, for example, 0.1 to 50 μg/kg or from 0.5 to 30 μg/kg. In particular embodiments, a dose at which GM-CSF can be administered includes 0.5 μg/kg, 1 μg/kg, 2 μg/kg, 3 μg/kg, 4 μg/kg, 5 μg/kg, 6 μg/kg, 7 μg/kg, 8 μg/kg, 9 μg/kg, 10 μg/kg, 11 μg/kg, 12 μg/kg, 13 μg/kg, 14 μg/kg, 15 μg/kg, 16 μg/kg, 17 μg/kg, 18 μg/kg, 19 μg/kg, 20 μg/kg, or more. In particular embodiments, GM-CSF can be administered subcutaneously for 1 day, 2 consecutive days, 3 consecutive days, 4 consecutive days, 5 consecutive days, or more. In particular embodiments, GM-CSF can be administered subcutaneously or intravenously. In particular embodiments, GM-CSF can be administered at a dose of 10 μg/kg subcutaneously daily initiated 3, 4, 5, 6, 7, or 8 days before adenoviral delivery. In particular embodiments, GM-CSF can be administered as a single agent followed by concurrent administration with another mobilization factor. In particular embodiments, GM-CSF can be administered as a single agent followed by concurrent administration with AMD3100. In particular embodiments, a treatment protocol includes a 5 day treatment where GM-CSF can be administered on day 1, day 2, day 3, and day 4 and on day 5, GM-CSF and AMD3100 are administered 6 to 8 hours prior to adenoviral administration. A dosing regimen for Sargramostim can include 200 μg/m², 210 μg/m², 220 μg/m², 230 μg/m², 240 μg/m², 250 μg/m², 260 μg/m², 270 μg/m², 280 μg/m², 290 μg/m², 300 μg/m², or more. In particular embodiments, Sargramostim can be administered for 1 day, 2 consecutive days, 3 consecutive days, 4 consecutive days, 5 consecutive days, or more. In particular embodiments, Sargramostim can be administered subcutaneously or intravenously. In particular embodiments, a dosing regimen for Sargramostim can include 250 μg/m²/day intravenous or subcutaneous and can be continued until a targeted cell amount is reached in the peripheral blood or can be continued for 5 days. In particular embodiments, Sargramostim can be administered as a single agent followed by concurrent administration with another mobilization factor. In particular embodiments, Sargramostim can be administered as a single agent followed by concurrent administration with AMD3100. In particular embodiments, a treatment protocol includes a 5 day treatment where Sargramostim can be administered on day 1, day 2, day 3, and day 4 and on day 5, Sargramostim and AMD3100 are administered 6 to 8 hours prior to adenoviral administration.

[0325] In particular embodiments, a therapeutically effective amount of AMD3100 includes 0.1 mg/kg to 100 mg/kg. In particular embodiments, a therapeutically effective amount of AMD3100 includes 0.5 mg/kg to 50 mg/kg. In particular embodiments, a therapeutically effective amount of AMD3100 includes 0.5 mg/kg, 1 mg/kg, 2 mg/kg, 3 mg/kg, 4 mg/kg, 5 mg/kg, 6 mg/kg, 7 mg/kg, 8 mg/kg, 9 mg/kg, 10 mg/kg, 11 mg/kg, 12 mg/kg, 13 mg/kg, 14 mg/kg, 15 mg/kg, 16 mg/kg, 17 mg/kg, 18 mg/kg, 19 mg/kg, 20 mg/kg, or more. In particular embodiments, a therapeutically effective amount of AMD3100 includes 4 mg/kg. In particular embodiments, a therapeutically effective amount of AMD3100 includes 5 mg/kg. In particular embodiments, a therapeutically effective amount of AMD3100 includes 10 μg/kg to 500 μg/kg or from 50 μg/kg to 400 μg/kg. In particular embodiments, a therapeutically effective amount of AMD3100 includes 100 μg/kg, 150 μg/kg, 200 μg/kg, 250 μg/kg, 300 μg/kg, 350 μg/kg, or more. In particular embodiments, AMD3100 can be administered subcutaneously or intravenously. In particular embodiments, AMD3100 can be administered subcutaneously at 160-240 μg/kg 6 to 11 hours prior to adenoviral delivery. In particular embodiments, a therapeutically effective amount of AMD3100 can be administered concurrently with administration of another mobilization factor. In particular embodiments, a therapeutically effective amount of AMD3100 can be administered following administration of another mobilization factor. In particular embodiments, a therapeutically effective amount of AMD3100 can be administered following administration of G-CSF. In particular embodiments, a treatment protocol includes a 5-day treatment where G-CSF is administered on day 1, day 2, day 3, and day 4 and on day 5, G-CSF and AMD3100 are administered 6 to 8 hours prior to adenoviral injection.

[0326] Therapeutically effective amounts of SCF to administer can include doses ranging from, for example, 0.1 to 100 μg/kg/day or from 0.5 to 50 μg/kg/day. In particular embodiments, a dose at which SCF can be administered includes 0.5 μg/kg/day, 1 μg/kg/day, 2 μg/kg/day, 3 μg/kg/day, 4 μg/kg/day, 5 μg/kg/day, 6 μg/kg/day, 7 μg/kg/day, 8 μg/kg/day, 9 μg/kg/day, 10 μg/kg/day, 11 μg/kg/day, 12 μg/kg/day, 13 μg/kg/day, 14 μg/kg/day, 15 μg/kg/day, 16 μg/kg/day, 17 μg/kg/day, 18 μg/kg/day, 19 μg/kg/day, 20 μg/kg/day, 21 μg/kg/day, 22 μg/kg/day, 23 μg/kg/day, 24 μg/kg/day, 25 μg/kg/day, 26 μg/kg/day, 27 μg/kg/day, 28 μg/kg/day, 29 μg/kg/day, 30 μg/kg/day, or more. In particular embodiments, SCF can be administered for 1 day, 2 consecutive days, 3 consecutive days, 4 consecutive days, 5 consecutive days, or more. In particular embodiments, SCF can be administered subcutaneously or intravenously. In particular embodiments, SCF can be injected subcutaneously at 20 μg/kg/day. In particular embodiments, SCF can be administered as a single agent followed by concurrent administration with another mobilization factor. In particular embodiments, SCF can be administered as a single agent followed by concurrent administration with AMD3100. In particular embodiments, a treatment protocol includes a 5 day treatment where SCF can be administered on day 1, day 2, day 3, and day 4 and on day 5, SCF and AMD3100 are administered 6 to 8 hours prior to adenoviral administration.

[0327] In particular embodiments, growth factors GM-CSF and G-CSF can be administered to mobilize HSPC in the bone marrow niches to the peripheral circulating blood to increase the fraction of HSPCs circulating in the blood. In particular embodiments, mobilization can be achieved with administration of G-CSF/Filgrastim (Amgen) and/or AMD3100 (Sigma). In particular embodiments, mobilization can be achieved with administration of GM-CSF/Sargramostim (Amgen) and/or AMD3100 (Sigma). In particular embodiments, mobilization can be achieved with administration of SCF/Ancestim (Amgen) and/or AMD3100 (Sigma). In particular embodiments, administration of G-CSF/Filgrastim precedes administration of AMD3100. In particular embodiments, administration of G-CSF/Filgrastim occurs concurrently with administration of AMD3100. In particular embodiments, administration of G-CSF/Filgrastim precedes administration of AMD3100, followed by concurrent administration of G-CSF/Filgrastim and AMD3100. US 20140193376 describes mobilization protocols utilizing a CXCR4 antagonist with a S1P receptor 1 (S1PR1) modulator agent. US 20110044997 describes mobilization protocols utilizing a CXCR4 antagonist with a vascular endothelial growth factor receptor (VEGFR) agonist.

[0328] Adenoviral vectors (e.g. Ad3, 7, 11, 14, 16, 21, 34, 37, or 50 vectors) are exemplary of vectors that can be administered in concert with HSPC mobilization. In particular embodiments, administration of an adenoviral vector occurs concurrently with administration of one or more mobilization factors. In particular embodiments, administration of an Adenoviral vector follows administration of one or more mobilization factors. In particular embodiments, administration of an Adenoviral vector follows administration of a first one or more mobilization factors and occurs concurrently with administration of a second one or more mobilization factors.

[0329] In particular embodiments, an HSC enriching agent, such as a CD19 immunotoxin or 5-FU can be administered to enrich for HSPCs. CD19 immunotoxin can be used to deplete all CD19 lineage cells, which accounts for 30% of bone marrow cells. Depletion encourages exit from the bone marrow. By forcing HSPCs to proliferate (whether via, e.g., CD19 immunotoxin of 5-FU), this stimulates their differentiation and exit from the bone marrow and increases transgene marking in peripheral blood cells.

[0330] Therapeutically effective amounts of HSC mobilization factors and/or HSC enriching agents can be administered through any appropriate administration route such as by, injection, infusion, perfusion, and more particularly by administration by one or more of bone marrow, intravenous, intradermal, intraarterial, intranodal, intralymphatic, intraperitoneal injection, infusion, or perfusion).

[0331] In particular embodiments, methods of the present disclosure can include selection for cells modified to express a selection marker (e.g., a mutant form of MGMT that is resistant to inactivation by 6-BG, but retains the ability to repair DNA damage). For example, particular embodiments include regimens that combine mobilization (e.g., a mobilization protocol described herein) with administration of an adenoviral vector described herein and administration BCNU or benzylguanine and temozolomide in the case of an adenoviral vector including a MGMT^{P140K} selection marker. In particular embodiments, the in vivo selection marker can include MGMT^{P140K} as described in Olszko et al., Gene Therapy 22: 591-595, 2015. Thus, selection for cells that express MGMT^{P140K} can select for transduced cells and/or contribute to therapeutic efficacy.

[0332] Adenoviral vectors can be administered concurrently with or following administration of one or more immunosuppression agents or immunosuppression regimens.

### IV(B). In Vitro and Ex Vivo Gene Therapy

[0333] In vitro gene therapy includes use of a vector, genome, or system of the present disclosure in a method of introducing exogenous DNA into a host cell (such as a target cell) and/or a nucleic acid (such as a target nucleic acid, such as a target genome), where the host cell or nucleic acid is not present in a multicellular organism (e.g., in a laboratory). In some embodiments, a target cell or nucleic acid is derived from a multicellular organism, such as a mammal (e.g., a mouse, rat, human, or non-human primate). In vitro engineering of a cell derived from a multicellular organism can be referred to as ex vivo engineering, and can be used in ex vivo therapy. In various embodiments, methods and compositions of the present disclosure are utilized, e.g., as disclosed herein, to modify a target cell or nucleic acid derived from a first multicellular organism and the engineered target cell or nucleic acid is then administered to a second multicellular organism, such as a mammal (e.g., a mouse, rat, human, or non-human primate), e.g., in a method of adoptive cell therapy. In some instances, the first and second organisms are the same single subject organism. Return of in vitro engineered material to a subject from which the material was derived can be an autologous therapy. In some instances, the first and second organisms are different organisms (e.g., two organisms of the same species, e.g., two mice, two rats, two humans, or two non-human primates of the same species). Transfer of engineered material derived from a first subject to a second different subject can be an allogeneic therapy.

[0334] Ex vivo cell therapies can include isolation of stem, progenitor or differentiated cells from a patient or a normal donor, expansion of isolated cells ex vivo—with or without genetic engineering—and administration of the cells to a subject to establish a transient or stable graft of the infused cells and/or their progeny. Such ex vivo approaches can be used, for example, to treat an inherited, infectious or neoplastic disease, to regenerate a tissue or to deliver a therapeutic agent to a disease site. In various ex vivo therapies there is no direct exposure of the subject to the gene transfer vector, and the target cells of transduction can be selected, expanded and/or differentiated, before or after any genetic engineering, to improve efficacy and safety.

[0335] Ex vivo therapies include haematopoietic stem cell (HSC) transplantation (HCT). Autologous HSC gene therapy represents a therapeutic option for several monogenic diseases of the blood and the immune system as well as for storage disorders, and it may become a first-line treatment option for selected disease conditions.

[0336] Applications of ex-vivo therapy include reconstituting dysfunctional cell lineages. For inherited diseases characterized by a defective or absent cell lineage, the lineage can be regenerated by functional progenitor cells, derived either from normal donors or from autologous cells that have been subjected to ex vivo gene transfer to correct the deficiency. An example is provided by SCIDs, in which a deficiency in any one of several genes blocks the development of mature lymphoid cells. Transplantation of non-manipulated normal donor HSCs, which can allow generation of donor-derived functional haematopoietic cells of various lineages in the host, represents a therapeutic option for SCIDs, as well as many other diseases that affect the blood and immune system. Autologous HSC gene therapy, which can include replacing a functional copy of a defective gene in transplanted haematopoietic stem/progenitor cells (HSPCs) and, similarly to HCT, can provide a steady supply of functional progeny, may have several advantages, including reduced risk of graft versus host disease (GvHD), reduced risk of graft rejection, and reduced need for post-transplant immunosuppression.

[0337] Applications of ex-vivo therapy include augmenting therapeutic gene dosage. In some applications, HSC gene therapy may augment the therapeutic efficacy of allogenic HCT. Therapeutic gene dosage can be engineered to supra-normal levels in transplanted cells.

[0338] Applications of ex-vivo therapy include introducing novel function and targeting gene therapy. Ex vivo gene therapy can confer a novel function to HSCs or their progeny, such as establishing drug resistance to allow administration of a high-dose antitumor chemotherapy regime or establishing resistance to a pre-established infection with a virus, such as HIV, or other pathogen by expressing RNA-based agents (for example, ribozymes, RNA decoys, antisense RNA, RNA aptamers and small interfering RNA) and protein-based agents (for example, dominant-negative mutant viral proteins, fusion inhibitors and engineered nucleases that target the pathogen's genome).

### IV(C). Conditions Treatable by Gene Therapy

[0339] At least in part because adenoviral vectors of the present disclosure (e.g. Ad3, 7, 11, 14, 16, 21, 34, 37, or 50 vectors) can be used in vivo, in vitro, or ex vivo for modification of host and/or target cells, and further because an adenoviral vector can include payloads encoding a wide variety of expression products, it will be clear from the present specification that various technologies provided herein have broad applicability and can be used to treat a wide variety of conditions. Examples of conditions treatable by administration of an adenoviral vector, genome, or system of the present disclosure include, without limitation, hemoglobinopathies, immunodeficiencies, point mutation conditions, cancers, protein deficiencies, infectious diseases, and inflammatory conditions.

[0340] In certain embodiments, vectors, genomes, systems and formulations disclosed herein can be used for treating subjects (humans, veterinary animals (dogs, cats, reptiles, birds, etc.), livestock (horses, cattle, goats, pigs, chickens, etc.), and research animals (monkeys, rats, mice, fish, etc.). Treating subjects includes delivering therapeutically effective amounts. Therapeutically effective amounts include those that provide effective amounts, prophylactic treatments, and/or therapeutic treatments.

[0341] In particular embodiments, methods and formulations disclosed herein can be used to treat blood disorders. In particular embodiments, formulations are administered to subjects to treat hemophilia, β-thalassemia major, Diamond Blackfan anemia (DBA), paroxysmal nocturnal hemoglobinuria (PNH), pure red cell aplasia (PRCA), refractory anemia, severe aplastic anemia, and/or blood cancers such as leukemia, lymphoma, and myeloma.

[0342] Hemoglobinopathies represent a global health burden with disproportionate outcomes. Defects in hemoglobin proteins or in the expression of globin genes can result in diseases termed hemoglobinopathies. Hemoglobinopathies are amongst the most common genetic disorders world-wide.

[0343] Every year, 1.1 million births worldwide are at risk for hemoglobinopathies, affecting as many as 25 in every 1,000 births in geographic regions where malaria falciparum is prevalent, owing to a natural resistance to malaria infection conferred by hemoglobin (Hb) genetic variance. In developed regions, patients are at risk of iron overload from chronic transfusions. In underdeveloped regions, survival is significantly lower. For example, in Africa, childhood mortality is 40% in patients with hemoglobinopathies, compared to 16% in all children.

[0344] Mutations in the globin genes may generate an abnormal form of hemoglobin, as in sickle cell disease (SCD) and hemoglobin C, D, and E disease, or result in reduced production of the α or β polypeptides and thus an imbalance of the globin chains in the cell. These latter conditions are termed α- or β-thalassemias, depending on which globin chain is impaired. 5% of the world population carries a significant hemoglobin variant with the sickle cell mutation in the b-globin (HBB) gene (a glutamate to valine conversion; historically E6V, contemporaneously E7V) being by far the most common (40% of carriers). The high prevalence and severity of hemoglobin disorders presents a substantial burden, impacting not only the lives of those affected but also health-care systems, since lifelong patient care is costly.

[0345] There are two forms of hemoglobin, fetal (HbF), which includes two alpha (α) and two gamma (γ) chains, and adult (HbA), which includes two a and two beta (β) chains. The natural switch from HbF to HbA occurs shortly after birth and is regulated by transcriptional repression of γ globin genes by factors including a master regulator, bcl11a. Critically, a variety of clinical observations demonstrate that the severity of β-hemoglobinopathies such as sickle cell disease and β-thalassemia are ameliorated by increased production of HbF.

[0346] In particular embodiments, a therapeutically effective treatment induces or increases expression of HbF, induces or increases production of hemoglobin and/or induces or increases production of β-globin. In particular embodiments, a therapeutically effective treatment improves blood cell function, and/or increases oxygenation of cells.

[0347] In various embodiments, the present disclosure includes treatment of a blood disorder using an adenoviral donor vector of the present disclosure that includes a coding nucleic acid sequence that encodes a protein or agent for treatment of the blood disorder. In various embodiments, the blood disorder is thalassemia and the protein is a β-globin or γ-globin protein, or a protein that otherwise partially or completely functionally replaces β-globin or γ-globin. In various embodiments, the blood disorder is hemophilia and the protein is ET3 or a protein that otherwise partially or completely functionally replaces Factor VIII. In various embodiments, the blood disorder is a point mutation disease such as sickle cell anemia, and the agent is a gene editing protein.

[0348] ET3 can have or include the following amino acid sequence: SEQ ID NO 154. In various embodiments, a Factor VIII replacement protein can have an amino acid sequence having at least 70%, 75%, 80%, 85%, 90%, 91%, 92%, 93%, 94%, 95%, 96%, 97%, 98%, 99%, or 100% identity to the SEQ ID NO: 154

(MQLELSTCVFLCLLPLGFSAIRRYYLGAVELSWDYRQSELLRELHVDTR
FPATAPGALPLGPSVLYKKTVFVEFTDQLFSVARPRPPWMGLLGPTIQAE
VYDTVVVTLKNMASHPVSLHAVGVSFWKSSEGAEYEDHTSQREKEDDKVL
PGKSQTYVWQVLKENGPTASDPPCLTYSYLSHVDLVKDLNSGLIGALLVC
REGSLTRERTQNLHEFVLLFAVFDEGKSWHSARNDSWTRAMDPAPARAQP
AMHTVNGYVNRSLPGLIGCHKKSVYWHVIGMGTSPEVHSIFLEGHTFLVR
HHRQASLEISPLTFLTAQTFLMDLGQFLLFCHISSHHHGGMEAHVRVESC
AEEPQLRRKADEEEDYDDNLYDSDMDVVRLDGDDVSPFIQIRSVAKKHPK
TWVHYIAAEEEDWDYAPLVLAPDDRSYKSQYLNNGPQRIGRKYKKVRFMA
YTDETFKTREAIQHESGILGPLLYGEVGDTLLIIFKNQASRPYNIYPHGI
TDVRPLYSRRLPKGVKHLKDFPILPGEIFKYKWTVTVEDGPTKSDPRCLT
RYYSSFVNMERDLASGLIGPLLICYKESVDQRGNQIMSDKRNVILFSVFD
ENRSWYLTENIQRFLPNPAGVQLEDPEFQASNIMHSINGYVFDSLQLSVC
LHEVAYWYILSIGAQTDFLSVFFSGYTFKHKMVYEDTLTLFPFSGETVFM
SMENPGLWILGCHNSDFRNRGMTALLKVSSCDKNTGDYYEDSYEDISAYL
LSKNNAIEPRSFAQNSRPPSASAPKPPVLRRHQRDISLPTFQPEEDKMDY
DDIFSTETKGEDFDIYGEDENQDPRSFQKRTRHYFIAAVEQLWDYGMSES
PRALRNRAQNGEVPRFKKVVFREFADGSFTQPSYRGELNKHLGLLGPYIR
AEVEDNIMVTFKNQASRPYSFYSSLISYPDDQEQGAEPRHNFVQPNETRT
YFWKVQHHMAPTEDEFDCKAWAYFSDVDLEKDVHSGLIGPLLICRANTLN
AAHGRQVTVQEFALFFTIFDETKSWYFTENVERNCRAPCHLQMEDPTLKE
NYRFHAINGYVMDTLPGLVMAQNQRIRWYLLSMGSNENIHSIHFSGHVFS
VRKKEEYKMAVYNLYPGVFETVEMLPSKVGIWRIECLIGEHLQAGMSTTF
LVYSKKCQTPLGMASGHIRDFQITASGQYGQWAPKLARLHYSGSINAWST
KEPFSWIKVDLLAPMIIHGIKTQGARQKFSSLYISQFIIMYSLDGKKWQT
YRGNSTGTLMVFFGNVDSSGIKHNIFNPPIIARYIRLHPTHYSIRSTLRM
ELMGCDLNSCSMPLGMESKAISDAQITASSYFTNMFATWSPSKARLHLQG
RSNAWRPQVNNPKEWLQVDFQKTMKVTGVTTQGVKSLLTSMYVKEFLISS
SQDGHQWTLFFQNGKVKVFQGNQDSFTPVVNSLDPPLLTRYLRIHPQSWV
HQIALRMEVLGCEAQDLYV).

[0349] β-globin can have or include the following amino acid sequence: SEQ ID NO 155. In various embodiments, a β-globin replacement protein can have an amino acid sequence having at least 70%, 75%, 80%, 85%, 90%, 91%, 92%, 93%, 94%, 95%, 96%, 97%, 98%, 99%, or 100% identity to SEQ ID NO: 155

(MVHLTPEEKSAVTALWGKVNVDEVGGEALGRLLVVYPWTQRFFESFGDL
STPDAVMGNPKVKAHGKKVLGAFSDGLAHLDNLKGTFATLSELHCDKLHV
DPENFRLLGNVLVCVLAHHFGKEFTPPVQAAYQKVVAGVANALAHKYH).

[0350] γ-globin can have or include the following amino acid sequence: SEQ ID NO 156. In various embodiments, a γ-globin replacement protein can have an amino acid sequence having at least 70%, 75%, 80%, 85%, 90%, 91%, 92%, 93%, 94%, 95%, 96%, 97%, 98%, 99%, or 100% identity to SEQ ID NO: 156

(MGHFTEEDKATITSLWGKVNVEDAGGETLGRLLVVYPWTQRFFDSFGNL
SSASAIMGNPKVKAHGKKVLTSLGDATKHLDDLKGTFAQLSELHCDKLHV
DPENFKLLGNVLVTVLAIHFGKEFTPEVQASWQKMVTAVASALSSRYH).

[0351] More than 80 primary immune deficiency diseases are recognized by the World Health Organization. These diseases are characterized by an intrinsic defect in the immune system in which, in some cases, the body is unable to produce any or enough antibodies against infection. In other cases, cellular defenses to fight infection fail to work properly. Typically, primary immune deficiencies are inherited disorders.

[0352] Secondary, or acquired, immune deficiencies are not the result of inherited genetic abnormalities, but rather occur in individuals in which the immune system is compromised by factors outside the immune system. Examples include trauma, viruses, chemotherapy, toxins, and pollution. Acquired immunodeficiency syndrome (AIDS) is an example of a secondary immune deficiency disorder caused by a virus, the human immunodeficiency virus (HIV), in which a depletion of T lymphocytes renders the body unable to fight infection.

[0353] X-linked severe combined immunodeficiency (SCID-X1) is both a cellular and humoral immune depletion caused by mutations in the common gamma chain gene (γC), which result in the absence of T and natural killer (NK) lymphocytes and the presence of nonfunctional B lymphocytes. SCID-X1 is fatal in the first two years of life unless the immune system is reconstituted, for example, through bone marrow transplant (BMT) or gene therapy.

[0354] Because most individuals lack a matched donor for BMT or non-autologous gene therapy, haploidentical parental bone marrow depleted of mature T cells is often used; however, complications include graft versus host disease (GVHD), failure to make adequate antibodies hence requiring long-term immunoglobulin replacement, late loss of T cells due to failure to engraft hematopoietic stem and progenitor cells (HSPCs), chronic warts, and lymphocyte dysregulation.

[0355] Fanconi anemia (FA) is an inherited blood disorder that leads to bone marrow failure. It is characterized, in part, by a deficient DNA-repair mechanism. At least 20% of patients with FA develop cancers such as acute myeloid leukemias, and cancers of the skin, liver, gastrointestinal tract, and gynecological systems. The skin and gastrointestinal tumors are usually squamous cell carcinomas. The average age of patients who develop cancer is 15 years for leukemia, 16 years for liver tumors, and 23 years for other tumors.

[0356] A therapeutic gene can be selected to provide a therapeutically effective response against a condition that, in particular embodiments, is inherited. In particular embodiments, the condition can be Grave's Disease, rheumatoid arthritis, pernicious anemia, Multiple Sclerosis (MS), inflammatory bowel disease, systemic lupus erythematosus (SLE), adenosine deaminase deficiency (ADA-SCID) or severe combined immunodeficiency disease (SCID), Wiskott-Aldrich syndrome (WAS), chronic granulomatous disease (CGD), Fanconi anemia (FA), Battens disease, adrenoleukodystrophy (ALD) or metachromatic leukodystrophy (MLD), muscular dystrophy, pulmonary alveolar proteinosis (PAP), pyruvate kinase deficiency, Schwachman-Diamond-Blackfan anemia, dyskeratosis congenita, cystic fibrosis, Parkinson's disease, Alzheimer's disease, or amyotrophic lateral sclerosis (Lou Gehrig's disease). In particular embodiments, depending on the condition, the therapeutic gene may be a gene that encodes a protein and/or a gene whose function has been interrupted.

[0357] In particular embodiments, methods and formulations disclosed herein can be used to treat cancer. In particular embodiments, formulations are administered to subjects to treat acute lymphoblastic leukemia (ALL), acute myelogenous leukemia (AML), chronic lymphocytic leukemia (CLL), chronic myelogenous leukemia (CML), chronic myelomonocytic leukemia, diffuse large B-cell lymphoma, follicular lymphoma, Hodgkin's lymphoma, juvenile myelomonocytic leukemia, multiple myeloma, myelodysplasia, and/or non-Hodgkin's lymphoma.

[0358] Additional exemplary cancers that may be treated include astrocytoma, atypical teratoid rhabdoid tumor, brain and central nervous system (CNS) cancer, breast cancer, carcinosarcoma, chondrosarcoma, chordoma, choroid plexus carcinoma, choroid plexus papilloma, clear cell sarcoma of soft tissue, diffuse large B-cell lymphoma, ependymoma, epithelioid sarcoma, extragonadal germ cell tumor, extrarenal rhabdoid tumor, Ewing sarcoma, gastrointestinal stromal tumor, glioblastoma, HBV-induced hepatocellular carcinoma, head and neck cancer, kidney cancer, lung cancer, malignant rhabdoid tumor, medulloblastoma, melanoma, meningioma, mesothelioma, multiple myeloma, neuroglial tumor, not otherwise specified (NOS) sarcoma, oligoastrocytoma, oligodendroglioma, osteosarcoma, ovarian cancer, ovarian clear cell adenocarcinoma, ovarian endometrioid adenocarcinoma, ovarian serous adenocarcinoma, pancreatic cancer, pancreatic ductal adenocarcinoma, pancreatic endocrine tumor, pineoblastoma, prostate cancer, renal cell carcinoma, renal medullary carcinoma, rhabdomyosarcoma, sarcoma, schwannoma, skin squamous cell carcinoma, and stem cell cancer. In various particular embodiments, the cancer is ovarian cancer. In various particular embodiments the cancer is breast cancer. Particular embodiments, formulations are administered to subjects to prevent or delay cancer reoccurrence or prevent or delay cancer onset in carriers of high-risk germ line mutations.

[0359] In the context of cancers, therapeutically effective amounts can decrease the number of tumor cells, decrease the number of metastases, decrease tumor volume, increase life expectancy, induce apoptosis of cancer cells, induce cancer cell death, induce chemo- or radiosensitivity in cancer cells, inhibit angiogenesis near cancer cells, inhibit cancer cell proliferation, inhibit tumor growth, prevent metastasis, prolong a subject's life, reduce cancer-associated pain, reduce the number of metastases, and/or reduce relapse or re-occurrence of the cancer following treatment.

[0360] In particular embodiments, methods and formulations disclosed herein can be used to treat point mutation conditions. In particular embodiments, formulations are administered to subjects to treat sickle cell disease, cystic fibrosis, Tay-Sachs disease, and/or phenylketonuria. In various embodiments, a transposon payload of the present disclosure encodes a CRISPR-Cas for corrective editing of a nucleic acid lesion. In various embodiments, a transposon payload of the present disclosure encodes a base editor for corrective editing of a nucleic acid lesion. In various embodiments, a transposon payload of the present disclosure encodes a prime editor for corrective editing of a nucleic acid lesion.

[0361] In particular embodiments, methods and formulations disclosed herein can be used to treat particular enzyme deficiency. In particular embodiments, formulations are administered to subjects to treat Hurler's syndrome, selective IgA deficiency, hyper IgM, IgG subclass deficiency, Niemann-Pick disease, Tay-Sachs disease, Gaucher disease, Fabry disease, Krabbe disease, glucosemia, maple syrup urine disease, phenylketonuria, glycogen storage disease, Friedreich ataxia, Zellweger syndrome, adrenoleukodystrophy, complement disorders, and/or mucopolysaccharidoses.

[0362] Therapeutically effective amounts may provide function to immune and other blood cells and/or microglial cells or may alternatively—depending on the treated condition—inhibit lymphocyte activation, induce apoptosis in lymphocytes, eliminate various subsets of lymphocytes, inhibit T cell activation, eliminate or inhibit autoreactive T cells, inhibit Th-2 or Th-1 lymphocyte activity, antagonize IL-1 or TNF, reduce inflammation, induce selective tolerance to an inciting agent, reduce or eliminate an immune-mediated condition; and/or reduce or eliminate a symptom of the immune-mediated condition. Therapeutically effective amounts may also provide functional DNA repair mechanisms; surfactant protein expression; telomere maintenance; lysosomal function; breakdown of lipids or other proteins such as amyloids; permit ribosomal function; and/or permit development of mature blood cell lineages which would otherwise not develop such as macrophages other white blood cell types.

[0363] In particular embodiments, methods of the present disclosure can restore T-cell mediated immune responses in a subject in need thereof. Restoration of T-cell mediated immune responses can include restoring thymic output and/or restoring normal T lymphocyte development.

[0364] In particular embodiments, restoring thymic output can include restoring the frequency of CD3+ T cells expressing CD45RA in peripheral blood to a level comparable to that of a reference level derived from a control population. In particular embodiments, restoring thymic output can include restoring the number of T cell receptor excision circles (TRECs) per 106 maturing T cells to a level comparable to that of a reference level derived from a control population. The number of TRECs per 106 maturing T cells can be determined as described in Kennedy et al., Vet Immunol Immunopathol 142: 36-48, 2011.

[0365] In particular embodiments, restoring normal T lymphocyte development includes restoring the ratio of CD4+ cells: CD8+ cells to 2. In particular embodiments, restoring normal T lymphocyte development includes detecting the presence of αβ TCR in circulating T-lymphocytes. The presence of αβ TCR in circulating T-lymphocytes can be detected, for example, by flow cytometry using antibodies that bind an α and/or β chain of a TCR. In particular embodiments, restoring normal T lymphocyte development includes detecting the presence of a diverse TCR repertoire comparable to that of a reference level derived from a control population. TCR diversity can be assessed by TCRVβ spectratyping, which analyzes genetic rearrangement of the variable region of the TCRβ gene. Robust, normal spectratype profiles can be characterized by a Gaussian distribution of fragments sized across 17 families of TCRVβ segments. In particular embodiments, restoring normal T lymphocyte development includes restoring T-cell specific signaling pathways. Restoration of T-cell specific signaling pathways can be assessed by lymphocyte proliferation following exposure to the T cell mitogen phytohemagglutinin (PHA). In particular embodiments, restoring normal T lymphocyte development includes restoring white blood cell count, neutrophil cell count, monocyte cell count, lymphocyte cell count, and/or platelet cell count to a level comparable to a reference level derived from a control population.

[0366] In particular embodiments, methods of the present disclosure can improve the kinetics and/or clonal diversity of lymphocyte reconstitution in a subject in need thereof. In particular embodiments, improving the kinetics of lymphocyte reconstitution can include increasing the number of circulating T lymphocytes to within a range of a reference level derived from a control population. In particular embodiments, improving the kinetics of lymphocyte reconstitution can include increasing the absolute CD3+ lymphocyte count to within a range of a reference level derived from a control population. A range of can be a range of values observed in or exhibited by normal (i.e., non-immuno-compromised) subjects for a given parameter. In particular embodiments, improving the kinetics of lymphocyte reconstitution can include reducing the time required to reach normal lymphocyte counts as compared to a subject in need thereof not administered a therapy described herein. In particular embodiments, improving the kinetics of lymphocyte reconstitution can include increasing the frequency of gene corrected lymphocytes as compared to a subject in need thereof not administered a therapy described herein. In particular embodiments, improving the kinetics of lymphocyte reconstitution can include increasing diversity of clonal repertoire of gene corrected lymphocytes in the subject as compared to a subject in need thereof not administered a gene therapy described herein. Increasing diversity of clonal repertoire of gene corrected lymphocytes can include increasing the number of unique retroviral integration site (RIS) clones as measured by a RIS analysis.

[0367] In particular embodiments, methods of the present disclosure can restore bone marrow function in a subject in need thereof. In particular embodiments, restoring bone marrow function can include improving bone marrow repopulation with gene corrected cells as compared to a subject in need thereof not administered a therapy described herein. Improving bone marrow repopulation with gene corrected cells can include increasing the percentage of cells that are gene corrected. In particular embodiments, the cells are selected from white blood cells and bone marrow derived cells. In particular embodiments, the percentage of cells that are gene corrected can be measured using an assay selected from quantitative real time PCR and flow cytometry.

[0368] In particular embodiments, methods of the present disclosure can normalize primary and secondary antibody responses to immunization in a subject in need thereof. Normalizing primary and secondary antibody responses to immunization can include restoring B-cell and/or T-cell cytokine signaling programs functioning in class switching and memory response to an antigen. Normalizing primary and secondary antibody responses to immunization can be measured by a bacteriophage immunization assay. In particular embodiments, restoration of B-cell and/or T-cell cytokine signaling programs can be assayed after immunization with the T-cell dependent neoantigen bacteriophage ψX174. In particular embodiments, normalizing primary and secondary antibody responses to immunization can include increasing the level of IgA, IgM, and/or IgG in a subject in need thereof to a level comparable to a reference level derived from a control population. In particular embodiments, normalizing primary and secondary antibody responses to immunization can include increasing the level of IgA, IgM, and/or IgG in a subject in need thereof to a level greater than that of a subject in need thereof not administered a gene therapy described herein. The level of IgA, IgM, and/or IgG can be measured by, for example, an immunoglobulin test. In particular embodiments, the immunoglobulin test includes antibodies binding IgG, IgA, IgM, kappa light chain, lambda light chain, and/or heavy chain. In particular embodiments, the immunoglobulin test includes serum protein electrophoresis, immunoelectrophoresis, radial immunodiffusion, nephelometry and turbidimetry. Commercially available immunoglobulin test kits include MININEPH™ (Binding site, Birmingham, UK), and immunoglobulin test systems from Dako (Denmark) and Dade Behring (Marburg, Germany). In particular embodiments, a sample that can be used to measure immunoglobulin levels includes a blood sample, a plasma sample, a cerebrospinal fluid sample, and a urine sample.

[0369] In particular embodiments, methods of the present disclosure can be used to treat SCID-X1. In particular embodiments, methods of the present disclosure can be used to treat SCID (e.g., JAK 3 kinase deficiency SCID, purine nucleoside phosphorylase (PNP) deficiency SCID, adenosine deaminase (ADA) deficiency SCID, MEW class II deficiency or recombinase activating gene (RAG) deficiency SCID). In particular embodiments, therapeutic efficacy can be observed through lymphocyte reconstitution, improved clonal diversity and thymopoiesis, reduced infections, and/or improved patient outcome. Therapeutic efficacy can also be observed through one or more of weight gain and growth, improved gastrointestinal function (e.g., reduced diarrhea), reduced upper respiratory symptoms, reduced fungal infections of the mouth (thrush), reduced incidences and severity of pneumonia, reduced meningitis and blood stream infections, and reduced ear infections. In particular embodiments, treating SCIDX-1 with methods of the present disclosure include restoring functionality to the γC-dependent signaling pathway. The functionality of the γC-dependent signaling pathway can be assayed by measuring tyrosine phosphorylation of effector molecules STAT3 and/or STAT5 following in vitro stimulation with IL-21 and/or IL-2, respectively. Tyrosine phosphorylation of STAT3 and/or STAT5 can be measured by intracellular antibody staining.

[0370] In particular embodiments, methods of the present disclosure can be used to treat FA. In particular embodiments, therapeutic efficacy can be observed through lymphocyte reconstitution, improved clonal diversity and thymopoiesis, reduced infections, and/or improved patient outcome. Therapeutic efficacy can also be observed through one or more of weight gain and growth, improved gastrointestinal function (e.g., reduced diarrhea), reduced upper respiratory symptoms, reduced fungal infections of the mouth (thrush), reduced incidences and severity of pneumonia, reduced meningitis and blood stream infections, and reduced ear infections. In particular embodiments, treating FA with methods of the present disclosure include increasing resistance of bone marrow derived cells to mitomycin C (MMC). In particular embodiments, the resistance of bone marrow derived cells to MMC can be measured by a cell survival assay in methylcellulose and MMC.

[0371] In particular embodiments, methods of the present disclosure can be used to treat hypogammaglobulinemia. Hypogammaglobulinemia is caused by a lack of B-lymphocytes and is characterized by low levels of antibodies in the blood. Hypogammaglobulinemia can occur in patients with chronic lymphocytic leukemia (CLL), multiple myeloma (MM), non-Hodgkin's lymphoma (NHL) and other relevant malignancies as a result of both leukemia-related immune dysfunction and therapy-related immunosuppression. Patients with acquired hypogammaglobulinemia secondary to such hematological malignancies, and those patients receiving post-HSPC transplantation are susceptible to bacterial infections. The deficiency in humoral immunity is largely responsible for the increased risk of infection-related morbidity and mortality in these patients, especially by encapsulated microorganisms. For example, Streptococcus pneumoniae, Haemophilus influenzae, and Staphylococcus aureus, as well as Legionella and Nocardia spp. are frequent bacterial pathogens that cause pneumonia in patients with CLL. Opportunistic infections such as Pneumocystis carinii, fungi, viruses, and mycobacteria also have been observed. The number and severity of infections in these patients can be significantly reduced by administration of immune globulin (Griffiths et al. Blood 73: 366-368, 1989; Chapel et al. Lancet 343: 1059-1063, 1994).

[0372] In particular embodiments, formulations are administered to subjects to treat acute lymphoblastic leukemia (ALL), acute myelogenous leukemia (AML), adrenoleukodystrophy, agnogenic myeloid metaplasia, amegakaryocytosic/congenital thrombocytopenia, ataxia telangiectasia, β-thalassemia, chronic granulomatous disease, chronic lymphocytic leukemia (CLL), chronic myelogenous leukemia (CML), chronic myelomonocytic leukemia, common variable immune deficiency (CVID), complement disorders, congenital agammaglobulinemia, Diamond Blackfan anemia (DBA), diffuse large B-cell lymphoma, familial erythrophagocytic lymphohistiocytosis, follicular lymphoma, Hodgkin's lymphoma, Hurler's syndrome, hyper IgM, IgG subclass deficiency, juvenile myelomonocytic leukemia, metachromatic leukodystrophy, mucopolysaccharidoses, multiple myeloma, myelodysplasia, non-Hodgkin's lymphoma, paroxysmal nocturnal hemoglobinuria (PNH), primary immunodeficiency diseases, pure red cell aplasia, refractory anemia, Shwachman-Diamond syndrome, selective IgA deficiency, severe aplastic anemia, sickle cell disease, specific antibody deficiency, Wiskott-Aldrich syndrome, and/or X-linked agammaglobulinemia (XLA).

[0373] Particular embodiments include treatment of secondary, or acquired, immune deficiencies such as immune deficiencies caused by trauma, viruses, chemotherapy, toxins, and pollution. As previously indicated, acquired immunodeficiency syndrome (AIDS) is an example of a secondary immune deficiency disorder caused by a virus, the human immunodeficiency virus (HIV), in which a depletion of T lymphocytes renders the body unable to fight infection. Thus, as another example, a gene can be selected to provide a therapeutically effective response against an infectious disease. In particular embodiments, the infectious disease is human immunodeficiency virus (HIV). The therapeutic gene may be, for example, a gene rendering immune cells resistant to HIV infection, or which enables immune cells to effectively neutralize the virus via immune reconstruction, polymorphisms of genes encoding proteins expressed by immune cells, genes advantageous for fighting infection that are not expressed in the patient, genes encoding an infectious agent, receptor or coreceptor; a gene encoding ligands for receptors or coreceptors; viral and cellular genes essential for viral replication including; a gene encoding ribozymes, antisense RNA, small interfering RNA (siRNA) or decoy RNA to block the actions of certain transcription factors; a gene encoding dominant negative viral proteins, intracellular antibodies, intrakines and suicide genes. Exemplary therapeutic genes and gene products include α2β1; αvβ3; αvβ5; αvβ63; BOB/GPR15; Bonzo/STRL-33/TYMSTR; CCR2; CCR3; CCR5; CCR8; CD4; CD46; CD55; CXCR4; aminopeptidase-N; HHV-7; ICAM; ICAM-1; PRR2/HveB; HveA; α-dystroglycan; LDLR/α2MR/LRP; PVR; PRR1/HveC; and laminin receptor. A therapeutically effective amount for the treatment of HIV, for example, may increase the immunity of a subject against HIV, ameliorate a symptom associated with AIDS or HIV, or induce an innate or adaptive immune response in a subject against HIV. An immune response against HIV may include antibody production and result in the prevention of AIDS and/or ameliorate a symptom of AIDS or HIV infection of the subject, or decrease or eliminate HIV infectivity and/or virulence.

[0374] Patients with MGMT expressing tumors would benefit from administration of adenoviral vector (e.g. Ad3, 7, 11, 14, 16, 21, 34, 37, or 50 vectors) with a therapeutic payload (such as a CAR, TCR, or checkpoint inhibitor) combined with the MGMT^{P140K} in vivo selection cassette. Ex vivo approaches have shown the applicability of this approach. In particular embodiments, therapeutic amounts of TMZ and benzylguanine or BCNU are administered to reduce the tumor burden or volume.

[0375] In particular embodiments, therapeutically effective amounts may provide function to immune and other blood cells, reduce or eliminate an immune-mediated condition; and/or reduce or eliminate a symptom of the immune-mediated condition.

[0376] The Exemplary Embodiments and Example(s) provided herein are included to demonstrate particular embodiments of the disclosure. Those of ordinary skill in the art should recognize in light of the present disclosure that many changes can be made to the specific embodiments disclosed herein and still obtain a like or similar result without departing from the spirit and scope of the disclosure.

### EXAMPLES

[0377] The present Examples demonstrate that certain adenoviral serotypes are particularly effective for infection of CD34+ cells such as HSCs. Because HSCs are a therapeutically important target for gene therapy, identification of vectors effective for transduction of CD34+ cells is of substantial clinical importance. Certain tested adenoviral serotypes were similarly or more effective for infection of CD34+ cells than others commonly associated with gene therapy trials and research, such as Ad5 and Ad5/35++.

### Example 1: Analysis of Adenoviral Vector Infection of CD34+ Cells by Anti-Hexon Staining

[0378] The present example utilizes anti-hexon staining to measure the infection of CD34+ cells by various adenoviral vectors. Serotypes used in experiments of this Example included Ad3, Ad5, Ad7, Ad11, Ad14, Ad16, Ad21, Ad26, Ad34, Ad35, Ad37, Ad48, Ad50, and Ad52, as well as an Ad5/35++ vector including E1 deletion (“F35”). Vectors were wild type human adenoviral vectors except as otherwise noted.

[0379] Human CD34+ cells (REF: 4Y-101C, LOT: 3038009, Donor ID: 15846) were infected with wild type human adenoviruses (identified by Ad type number) with 5,000 or 2,000 viral particles per cell (vp/c). Three hours post-incubation, cells were first washed with phosphate buffered saline (PBS), quickly trypsinized to remove all extracellular viral particles, and washed with PBS. Washed cells were then split into two aliquots utilized in the present Example for analysis of intra-cellular adenovirus particles by anti-hexon staining and in Example 2 for analysis of adenoviral DNA internalization by qPCR, respectively. A replicate trial was additionally conducted in which CD34+ cells were infected at 2,000, 10,000, and 20,000 viral particles per cell (vp/c).

[0380] In the present Example, cells were first fixed with fixation medium (Thermofisher) for 15 minutes at room temperature. After a PBS washing step, cells were resuspended in permeabilization medium (Thermofisher). Anti-adenovirus hexon antibody (clone 20/11, MAB8052, Sigma) was added to the permeabilization medium and incubated at 4° C. overnight. On the second day, cells were washed twice with PBS and stained with the Alexa Fluor 488-labeled secondary antibody (Catalog #A-21121, Thermofisher) in permeabilization medium. Staining was stopped with two PBS washing steps, and the cells were analyzed on a Beckman Coulter Gallios Flow Cytometer. Background signal was obtained by analyzing the isotype control, which refers to staining using mouse IgG1 Isotype Control antibody (Sigma, REF: M5284-.1MG, Clone: MOPC 21). The percentage of FITC positive cells is displayed in the FIG. 1. For each virus two samples are shown for each virus dose.

[0381] Results of anti-hexon staining are provided in FIG. 1. Reference serotypes in this Example, as shown in FIG. 1, include Ad5 and Ad5/35++ (F35) serotypes that are often used, e.g., that have been used in gene therapy research or adenoviral vector constructs. Unexpectedly, several adenoviral vector serotypes consistently outperformed these reference serotypes for internalization into CD34+ cells. These included Ad3, 7, 11, 14, 16, 21, 34, 35, and 50. By contrast, serotypes Ad26, Ad37, Ad48, and Ad52 consistently did not outperform reference serotypes for internalization into CD34+ cells. These data demonstrate that Ad3, 7, 11, 14, 16, 21, 34, 35, and 50 are particularly and unexpectedly useful for engineering of vectors for transduction of CD34+ cells such as HSCs.

### Example 2: Analysis of the Internalization of Adenovirus Particles into CD34+ Cells by qPCR

[0382] The present example utilizes qPCR to measure the internalization of adenovirus particles into CD34+ cells by various adenoviral serotypes. Serotypes used in experiments of this Example included Ad3, Ad5, Ad7, Ad11, Ad14, Ad16, Ad21, Ad26, Ad34, Ad37, Ad35, Ad48, Ad50, and Ad52, as well as Ad5/35++ vector including an E1 deletion (“F35”). The viruses used were purified wild type human adenoviruses except as otherwise noted. Cells were prepared as described in Example 1.

[0383] In the present Example, total genomic DNA was isolated using the Monarch® Genomic DNA Purification Kit (NEB). For qPCR analyses, samples were split into two experiments: Ad3, 7, 11, 14, 16, 21, 34, 35, and 50 in a first experiment; and Ad26, Ad37, Ad48, Ad52, Ad5, and F35 in a second experiment. For the first experiment, primers and probe targeting DNA polymerase were used for amplification and purified plasmid containing the Ad35 genome (pAd35) was used to generate a standard curve. For the second experiment, primers and probe targeting hexon were used for amplification and purified plasmid containing the Ad5 genome (pAd5) was used to generate a standard curve. For normalization, primers that amplify the gene hB2M were applied.

[0384] Results of the qPCR analyses of this Example are provided in FIG. 2. Broadly, viral copy number per cell was highest using Ad7, Ad11, Ad14, Ad16, Ad21, Ad34, Ad35, Ad50, and F35. Viral copies per cell were also detected for Ad3, Ad37, Ad48, Ad52, and Ad5. Viral copy number per cell was lowest for Ad26.

### Example 3: Analysis of Adenoviral Vector Infection of CD34+ Cells by Anti-Hexon Staining

[0385] The present example utilizes anti-hexon staining to measure the infection of CD34+ cells by various adenoviral vectors. Serotypes used in experiments of this Example included Ad3, Ad5, Ad7, Ad11, Ad14, Ad16, Ad21, Ad26, Ad34, Ad35, Ad37, Ad48, Ad50, and Ad52, as well as an Ad5/35++ vector including E1 deletion (“F35”). Vectors were wild type human adenoviral vectors except as otherwise noted.

[0386] Human CD34+ cells from three donors were infected with wild type human adenoviruses (identified by Ad type number) with 5,000 or 2,000 viral particles per cell (vp/c). Donor 1 cells (Lonza, REF: 4Y-101C, LOT: 3038009, Donor ID: 15846) and Donor 2 cells (Lonza, REF: 4Y-101E, LOT: 3046829, Donor ID: 14538) were from donors subjected to mobilization of hematopoietic stem cells (HSCs) by G-CSF; while Donor 3 cells (Hemacare, REF: M34C-MOZ-1, LOT: 20063998) were from donors subjected to HSC mobilization by plerixafor. Three or six hours post-incubation, cells were first washed with phosphate buffered saline (PBS), quickly trypsinized to remove all extracellular viral particles, and washed with PBS. Washed cells were then split into two aliquots utilized in the present Example for analysis of intra-cellular adenovirus particles by anti-hexon staining (this Example), and for analysis of adenoviral DNA internalization by qPCR (Example 4), respectively.

[0387] In the present Example, cells were first fixed with fixation medium (Thermofisher) for 15 minutes at room temperature. After a PBS washing step, cells were resuspended in permeabilization medium (Thermofisher). Anti-adenovirus hexon antibody (clone 20/11, MAB8052, Sigma) was added to the permeabilization medium and incubated at 4° C. overnight. On the second day, cells were washed twice with PBS and stained with the Alexa Fluor 488-labeled secondary antibody (Catalog #A-21121, Thermofisher) in permeabilization medium. Staining was stopped with two PBS washing steps, and the cells were analyzed on a Beckman Coulter Gallios Flow Cytometer. Background signal was obtained by analyzing the negative control, which refers to uninfected cells stained with the same antibodies as the sample, and/or isotype control, which refers to staining using mouse IgG1 Isotype Control antibody (Sigma, REF: M5284-.1MG, Clone: MOPC 21). The percentage of FITC positive cells is displayed in FIGS. 3-13. For each virus two or three samples are shown for each virus dose.

[0388] Results of anti-hexon staining are provided in FIG. 3-13. Reference serotypes in this Example, as shown in FIGS. 3-13, include Ad5 and Ad5/35++(F35) serotypes that are often used, e.g., that have been used in gene therapy research or adenoviral vector constructs. Unexpectedly, several adenoviral serotypes consistently outperformed the reference Ad5 serotype, and in some instances also outperformed the reference F35 serotype, for internalization into CD34+ cells. These included Ad3, 7, 11, 14, 16, 21, 34, 35, 37, and 50. Serotype Ad37 outperformed reference serotype Ad5 for internalization into CD34+ cells from Donors 2 and 3, but not Donor 1. By contrast, serotypes Ad26, Ad48, and Ad52 consistently did not outperform reference serotypes for internalization into CD34+ cells. These data demonstrate that Ad3, 7, 11, 14, 16, 21, 34, 35, 37, and 50 are particularly and unexpectedly useful for engineering of vectors for transduction of CD34+ cells such as HSCs.

### Example 4: Analysis of the Internalization of Adenovirus Particles into CD34+ Cells by qPCR

[0389] The present example utilizes qPCR to measure the internalization of adenovirus particles into CD34+ cells by various adenoviral serotypes. Serotypes used in experiments of this Example included Ad3, Ad5, Ad7, Ad11, Ad14, Ad16, Ad21, Ad26, Ad34, Ad37, Ad35, Ad48, Ad50, and Ad52, as well as Ad5/35++ vector including an E1 deletion (“F35”). The viruses used were purified wild type human adenoviruses except as otherwise noted. Cells were prepared as described in Example 3.

[0390] In the present Example, total genomic DNA was isolated using the Monarch® Genomic DNA Purification Kit (NEB). For qPCR analyses, samples were split into two experiments: Ad3, 7, 11, 14, 16, 21, 34, 35, and 50 in a first experiment; and Ad26, Ad37, Ad48, Ad52, Ad5, and F35 in a second experiment. For the first experiment, primers and probe targeting DNA polymerase were used for amplification and purified plasmid containing the Ad35 genome (pAd35) was used to generate a standard curve. For the second experiment, primers and probe targeting hexon were used for amplification and purified plasmid containing the Ad5 genome (pAd5) was used to generate a standard curve. For normalization, primers that amplify the gene hB2M were applied. Where examined, background signal was obtained by analyzing the negative control, which refers to genomic DNA isolated from non-infected cells, and/or water (H₂O) control, which refers to using water instead of genomic DNA in the qPCR reaction.

[0391] Results of the qPCR analyses of this Example are provided in FIGS. 14-24. Broadly, viral copy number per cell was highest using Ad3, Ad7, Ad11, Ad14, Ad16, Ad21, Ad34, Ad35, Ad37, Ad50, and F35. Viral copies per cell were also detected for Ad5, Ad26, Ad48, and Ad52.

### Example 5: Production of First Generation Adenoviral Vectors

[0392] The present example includes the production of first generation adenoviral vectors from various adenoviral serotypes. Serotypes used in experiments of this Example included Ad11, Ad34, and Ad35. First generation adenoviral genomes were produced with the regulatory E1 gene (E1a and E1b) removed from the Ad genome. Additionally, first generation Ad genomes were engineered to replace the endogenous E4orf6 gene, if the endogenous E4orf6 gene was not of Ad5 serotype, with an Ad5 E4orf6 gene. The first generation Ad35 genome further included a mutant Ad35++ fiber knob, which fiber knob is described elsewhere herein, and which first generation Ad35 genome is referred to in the present Examples as a first generation Ad35++ genome. First generation Ad genomes of the present Example were also engineered to include a nucleic acid payload expressing green fluorescence protein (GFP) from a coding sequence under the control of an EF1-alpha promoter and operably linked with a bovine growth hormone (BGH) polyadenylation signal. Those of ordinary skill in the art will appreciate from the present Examples and disclosure that other adenoviral serotypes (e.g., Ad3, Ad5, Ad7, Ad14, Ad16, Ad21, Ad26, Ad37, Ad48, Ad50, and Ad52) can also be used to produce adenoviral vector genomes such as first generation adenoviral vector genomes and other forms or generations disclosed herein.

[0393] Plasmids encoding first-generation Ad genomes were transfected into HEK293 cells and propagated to determine whether viable Ad vectors could be rescued. Rescued Ad vectors were purified using standard methods (see, e.g., Su et al. doi:10.1101/pdb.prot095547 Cold Spring Harb Protoc 2019).

[0394] Purified Ad vectors were characterized using several approaches. The physical titer or yield of the purified virus preparations was determined by spectrophotometry and can be expressed as the total number of purified viral particles (vp) or the number of viral particles per transfected HEK293 cell (vp/cell). Table 19 shows the results from experiments to characterize the purified first generation Ad preparations.

TABLE 19
Characterization of Purified First Generation Ad Preparations

| | Yield | Yield |
|---|---|---|
| Vector | (vp) | (vp/cell) |
| First generation Ad11 | 1.2e12 | 3.1e3 |
| First generation Ad34 | 2e12 | 4.3e3 |
| First generation Ad35++ | 8e12 | 3e4 |

[0395] Purified Ad vectors were additionally characterized by restriction enzyme digestion of DNA isolated from the purified Ad preparations. Isolated DNA was digested using restriction enzymes (Sural, SspI, or BspHI), and the restriction pattern was compared to the restriction pattern obtained by digestion using the same restriction enzyme of the starting plasmid encoding the first generation Ad genome and/or the predicted restriction pattern based on the sequence of the Ad genome. Analysis of the restriction patterns on a gel showed the expected banding pattern and expected band sizes (FIGS. 25-28), demonstrating successful production of first generation Ad11, Ad34, and Ad35++ vectors.

### Example 6: Analysis of First Generation Adenoviral Vector Infection of Cells

[0396] The present example utilizes analysis of GFP payload expression to measure the infection of cells by various first generation adenoviral vectors. Serotypes used in experiments of this Example included Ad11, Ad34, Ad35, and Ad35++(Ad35 with mutant Ad35 fiber knob as described elsewhere herein). Vectors were first generation adenoviral vectors and included a nucleic acid payload encoding GFP, as described in Example 5.

[0397] Human cell lines (HEK293 and K562) and CD34+ cells (from Donors 1, 2, and 3 cells as set forth in Example 3) were infected with first generation adenoviral vectors (identified by Ad type number) with between 100 to 5,000 viral particles per cell (vp/c). At 3, 24, 25, or 48 hours post-incubation, cells were first washed with phosphate buffered saline (PBS), quickly trypsinized to remove all extracellular viral particles, and washed with PBS. Washed cells were then split into two aliquots utilized in the present Example for analysis of intra-cellular adenovirus particles by analysis of GFP payload expression (this Example) and for analysis of adenoviral DNA internalization by qPCR (in Example 7), respectively.

[0398] In the present Example, cells were analyzed on a Beckman Coulter Gallios Flow Cytometer by detecting GFP payload expression. Results of analysis of GFP payload expression are provided as the percentage of GFP positive cells in FIGS. 29-32. First generation adenoviral vectors of serotypes Ad11, Ad34, Ad35, and Ad35++ showed substantial performance for internalization into HEK293 cells (FIGS. 29 and 30). First generation adenoviral vectors of serotypes Ad34 and Ad35++ showed substantial performance for internalization into K562 cells (FIG. 31). First generation adenoviral vectors of serotypes Ad11, Ad34, and Ad35++ showed substantial performance for internalization into CD34+ cells (FIG. 32). These data demonstrate that the tested serotypes can be engineered into vectors for transduction of human cells, and further demonstrate that serotypes Ad11, Ad34, and Ad35++ can be engineered into vectors for transduction of CD34+ cells, such as HSCs.

[0399] Further characterization of infection of cells using first generation adenoviral vectors from serotypes Ad11, Ad34, Ad35 (first generation Ad35 and first generation Ad35++) was performed by examining GFP payload expression in CD34+/CD90+ subpopulation of CD34+ cells from Donor 1 and Donor 3. The CD34+/CD90+ subpopulation defines a more primitive subpopulation of HSCs. To distinguish the CD34+/CD90+ subpopulation, 46 hours after transduction cells were resuspended in staining buffer (0.5% BSA in PBS) with a Fc receptor blocking solution (BioLegend, Human TruStain FcX) at 4° C. for 15 minutes. Next, the cells were incubated at 4° C. for 20 minutes with anti-CD34 antibody conjugated to APC (BD Biosciences, REF: 340441, clone 8G12) and anti-CD90 antibody conjugated to BV421 (BD Biosciences, REF: 562556, clone 5E10). Cells were washed once with 0.5% BSA in PBS, and then analyzed by flow cytometry. The flow cytometry data were to identify CD34+ cells and CD34+/CD90+ cells. Within each populations of cells, the GFP positive cells were identified in order to determine the percentage of GFP positive cells and the geometric mean fluorescence intensity (MFI) of GFP in the GFP positive cells. An exemplary gating is shown in FIG. 33. Results of analysis of GFP payload expression in the CD34+/CD90+ subpopulation compared to the CD34+ population are provided as the percentage of GFP positive cells in FIGS. 34 and 35 and the geometric MFI of GFP in the GFP positive cells in FIGS. 36 and 37. First generation adenoviral vectors of serotypes Ad11, Ad34, Ad35, and Ad35++ showed greater infectivity of the CD34+/CD90+ subpopulation of cells compared to the general CD34+ population at 2,000 and 5,000 viral particles per cell. The tested serotypes also showed greater expression of payload encoded GFP in the CD34+/CD90+ subpopulation of cells compared to the general CD34+ population at 5,000 viral particles per cell. These data demonstrate that the tested serotypes can be engineered into vectors for transduction of human CD34+ cells, and can be particularly effective in transducing CD34+/CD90+ primitive HSCs.

### Example 7: Analysis of First Generation Adenoviral Vector Infection of Cells by qPCR

[0400] The present example utilizes qPCR to measure the internalization of adenovirus particles into HEK293 cells and CD34+ cells (from Donor 2) by various adenoviral serotypes. Serotypes used in experiments of this Example included Ad11, Ad34, and Ad35++. The viruses used were purified first generation adenoviral vectors and included a nucleic acid payload encoding GFP, as described in Example 5. Cells were prepared as described in Example 6.

[0401] In the present Example, total genomic DNA was isolated using the Monarch® Genomic DNA Purification Kit (NEB). For qPCR analyses, primers and probe targeting DNA polymerase were used for amplification and purified plasmid containing the Ad35 genome (pAd35) was used to generate a standard curve. For normalization, primers that amplify the gene hB2M were applied.

[0402] Results of the qPCR analyses of this Example are provided in FIGS. 38 and 39. Broadly, viral copy number per cell was detected and comparable for Ad11, Ad34, and Ad35++.

### OTHER EMBODIMENTS

[0403] While we have described a number of embodiments, it is apparent that our disclosure and examples also provide other embodiments that utilize or are encompassed by the compositions and methods described herein. Therefore, it will be appreciated that the scope of disclosure is to be defined by that which may be understood from the disclosure rather than by the specific embodiments that have been represented by way of example. Limitations described with respect to one aspect of the disclosure, in certain embodiments, be practiced with respect to other aspects of the disclosure. For example, limitations of claims that depend directly or indirectly from a certain independent claim presented herein serve as support for those limitations being presented in additional dependent claims of one or more other independent claims.

What is claimed is:

1. A method of in vivo gene therapy in a mammalian subject, the method comprising administering to the subject an adenoviral vector, wherein the adenoviral vector comprises:
(a) a capsid comprising one or more viral polypeptides of an Ad3, Ad7, Ad11, Ad14, Ad16, Ad21, Ad34, Ad37, or Ad50 serotype, wherein the one or more viral polypeptides comprise one or more of a:
(i) fiber knob;
(ii) fiber shaft;
(iii) fiber tail;
(iv) penton; and
(v) hexon; and
(b) a double-stranded DNA genome comprising a heterologous nucleic acid payload.

2. The method of claim 1, wherein the genome further comprises:
(a) a 3′ ITR and a 5′ ITR, wherein each of the 3′ ITR and the 5′ ITR are of the viral polypeptide serotype; and
(b) a packaging sequence, wherein the packing sequence is of the viral polypeptide serotype.

3. The method of claim 1 or 2, wherein the method comprises mobilization of hematopoietic stem cells of the subject prior to administration of the adenoviral vector.

4. The method of any one of claims 1-3, wherein the heterologous nucleic acid payload comprises a selectable marker, optionally wherein the selectable marker is MGMT^{P140K}.

5. The method of claim 4, wherein the method comprises administering a selecting agent to the subject, optionally wherein the selecting agent comprises O⁶BG and/or BCNU.

6. The method of any one of claims 1-5, wherein the method comprises administering one or more immunosuppression agents to the subject, optionally wherein the administration of the one or more immunosuppression agents is prior to the administration of the adenoviral vector.

7. An adenoviral donor vector comprising:
(a) a capsid comprising one or more viral polypeptides of an Ad3, Ad7, Ad11, Ad14, Ad16, Ad21, Ad34, Ad37, or Ad50 serotype, wherein the one or more viral polypeptides comprise one or more of a:
(i) fiber knob;
(ii) fiber shaft;
(iii) fiber tail;
(iv) penton; and
(v) hexon; and
(b) a double-stranded DNA genome comprising a heterologous nucleic acid payload.

8. The vector of claim 7, wherein the genome further comprises:
(a) a 3′ ITR and a 5′ ITR, wherein each of the 3′ ITR and the 5′ ITR are of the viral polypeptide serotype; and
(b) a packaging sequence, wherein the packing sequence is of the viral polypeptide serotype.

9. The vector of claim 7 or 8, wherein the heterologous nucleic acid payload comprises a selectable marker, optionally wherein the selectable marker is MGMT^{P140K}.

10. The method or vector of any one of claims 1-9, wherein the one or more viral polypeptides comprise the:
(a) fiber knob and fiber shaft;
(b) fiber knob and fiber tail;
(c) fiber knob and penton;
(d) fiber knob and hexon;
(e) fiber knob, hexon, and penton;
(f) fiber shaft and fiber tail;
(g) fiber shaft and penton;
(h) fiber shaft and hexon;
(i) fiber shaft, hexon, and penton;
(j) fiber tail and penton;
(k) fiber tail and hexon;
(l) fiber tail, hexon, and penton;
(m) fiber knob, fiber shaft, and fiber tail;
(n) fiber knob, fiber shaft, and penton;
(o) fiber knob, fiber shaft, and hexon;
(p) fiber knob, fiber shaft, hexon, and penton;
(q) fiber knob, fiber shaft, fiber tail, and penton;
(r) fiber knob, fiber shaft, fiber tail, penton, and hexon; or
(s) penton and hexon.

11. The method or vector of any one of claims 1-10, wherein the fiber knob has a sequence that has at least 80% identity to a sequence selected from SEQ ID NOs: 14, 30, 46, 62, 78, 94, 110, 126, and 142.

12. The method or vector of any one of claims 1-11, wherein the fiber shaft has a sequence that has at least 80% identity to a sequence selected from SEQ ID NOs: 13, 29, 45, 61, 77, 93, 109, 125, and 141.

13. The method or vector of any one of claims 1-12, wherein the fiber tail has a sequence that has at least 80% identity to a sequence selected from SEQ ID NOs: 157, 158, 159, 160, 161, 162, 163, 164, and 165.

14. The method or vector of any one of claims 1-13, wherein the penton has a sequence that has at least 80% identity to a sequence selected from SEQ ID NOs: 15, 31, 47, 63, 79, 95, 111, 127, and 143.

15. The method or vector of any one of claims 1-14, wherein the hexon has a sequence that has at least 80% identity to a sequence selected from SEQ ID NOs: 16, 32, 48, 64, 80, 96, 112, 128, and 144.

16. The method or vector of any one of claims 1-15, wherein the adenoviral vector comprises a fiber of the serotype of the viral peptides.

17. The method or vector of any one of claims 1-16, wherein the fiber has a sequence that has at least 80% identity to a sequence selected from SEQ ID NOs: 12, 28, 44, 60, 76, 92, 108, 124, and 140.

18. The method or vector of any one of claims 1-17, wherein the adenoviral vector is a chimeric vector characterized in that the capsid comprises at least one of a fiber knob, fiber shaft, fiber tail, hexon, or penton that is not of the serotype of the viral peptides.

19. The method of any one of claims 1-18, wherein the adenoviral vector is a helper dependent vector.

20. An adenoviral donor vector genome comprising:
(a) a 3′ ITR and a 5′ ITR, wherein the 3′ ITR and the 5′ ITR are each of the same serotype selected from an Ad3, Ad7, Ad11, Ad14, Ad16, Ad21, Ad34, Ad37, or Ad50 serotype;
(b) a packaging sequence, wherein the packing sequence is of the ITR serotype; and
(c) a heterologous nucleic acid payload.

21. The adenoviral donor vector genome of claim 20, wherein the heterologous nucleic acid payload comprises a selectable marker, optionally wherein the selectable marker is MGMT P^{140K}.

22. The method, vector, or genome of any one of claims 1-21, wherein the heterologous nucleic acid payload encodes a protein.

23. The method, vector, or genome of any one of claims 1-21, wherein the heterologous nucleic acid payload encodes a chimeric antigen receptor (CAR), T cell receptor (TCR), or small RNA, optionally wherein the small RNA is an shRNA.

24. The method, vector, or genome of any one of claims 1-21, wherein the heterologous nucleic acid payload encodes a gene editing enzyme or system, wherein the gene editing is selected from CRISPR editing, base editing, prime editing, or zinc finger nuclease editing.

25. The method, vector, or genome of any one of claims 1-24, wherein the heterologous nucleic acid payload encodes an agent for treatment of a condition selected from glioblastoma, hemoglobinopathies, platelet disorders, Fanconi anemia, alpha-1 antitrypsin deficiency, sickle cell anemia, thalassemia, thalassemia intermedia, von Willebrand Disease, hemophilia A, hemophilia B, Factor V Deficiency, Factor VII Deficiency, Factor X Deficiency, Factor XI Deficiency, Factor XII Deficiency, Factor XIII Deficiency, Bernard-Soulier Syndrome, Gray Platelet Syndrome, mucopolysaccharidosis, cystic fibrosis, Tay-Sachs disease, chronic granulomatous disease, Wiskott Aldrich syndrome and phenylketonuria.

26. The method, vector, or genome of any one of claims 1-24, wherein the heterologous nucleic acid payload encodes an agent for treatment of a condition selected from Grave's Disease, rheumatoid arthritis, pernicious anemia, Multiple Sclerosis (MS), inflammatory bowel disease, systemic lupus erythematosus (SLE), adenosine deaminase deficiency (ADA-SCID) or severe combined immunodeficiency disease (SCID), Wiskott-Aldrich syndrome (WAS), chronic granulomatous disease (CGD), Fanconi anemia (FA), Battens disease, adrenoleukodystrophy (ALD) or metachromatic leukodystrophy (MLD), muscular dystrophy, pulmonary alveolar proteinosis (PAP), pyruvate kinase deficiency, Schwachman-Diamond-Blackfan anemia, dyskeratosis congenita, cystic fibrosis, Parkinson's disease, Alzheimer's disease, and amyotrophic lateral sclerosis (Lou Gehrig's disease).

27. The method, vector, or genome of any one of claims 1-26, wherein the serotype of the viral polypeptides is Ad34.

28. A pharmaceutical composition comprising an adenoviral vector of any one of claims 7-27, wherein the pharmaceutical composition is formulated for injection to a subject in need thereof.

29. The method, vector, genome, or pharmaceutical composition of any one of claims 1-28, wherein the adenoviral vector infects and/or transduces CD34+ cells, CD34+high cells, CD34+/CD90+ cells, and/or CD34+high/CD90+ cells, optionally wherein the cells are hematopoietic cells.

The application's sequence listing, which the Patent Office published only in electronic form, follows.

SEQUENCE LISTING (175 sequences)

SEQ ID NO: 1 - DNA, 136 bp, Human mastadenovirus B
ctatctatataatataccttatagatggaatggtgccaacatgtaaatgaggtaatttaaaaaagtgcgcgctgtgtggtgattggctgcggggttaacggctaaaaggggcggcgcgaccgtgggaaaatgacgt

SEQ ID NO: 2 - DNA, 136 bp, Human mastadenovirus B
acgtcattttcccacggtcgcgccgccccttttagccgttaaccccgcagccaatcaccacacagcgcgcacttttttaaattacctcatttacatgttggcaccattccatctataaggtatattatatagatag

SEQ ID NO: 3 - DNA, 343 bp, Human mastadenovirus B
gacttatgtgggaggagttatgttgcaagttattacggtaaatgtgacgtaaaacgaggtgtggtttgaacacggaagtagacagttttcccacgcttactgacaggatatgaggtagttttgggcggatgcaagtgaaaattctccattttcgcgcgaaaactaaatgaggaagtgaatttctgagtcatttcgcggttatgccagggtggagtatttgccgagggccgagtagactttgaccgtttacgtggaggtttcgattaccgtgtttttcacctaaatttccgcgtacggtgtcaaagttctgtgtttttacgtaggtgtcagctgatcgctaggg

SEQ ID NO: 4 - DNA, 3439 bp, Human mastadenovirus B
tatttaaacctgacgagttccgtcaagaggccactcttgagtgccagcgagaagagttttctcctccgcgccgcaagtcagttctgcgctttgaaaatgagacacctgcgcttcctgccacaggaggttatctccagtgagaccgggatcgaaatactggagtttgtggtaaataccctaatgggagacgacccggaaccgccagtgcagcctttcgatccacctacgctgcacgatctgtatgatttagagatagacgggccggaggatcccaatgaggaagctgtgaatgggttttttactgattctatgctgctagctgctgatgaaggattggacataaaccctcctcctgagacacttgttaccccaggggtggttgtggaaagcggcataggtgggaaaaaattgcctgatctgggagcagctgaaatggacttgcgttgttatgaagagggttttcctcccagtgatgatgaagatggggaaactgagcagtccatccataccgcagtaaatgagggagtaaaagctgccagcgatgtttttaagttggactgtccggagctgcctggacatggctgtaagtcttgtgaatttcacaggaataacactggaatgaaagaactattgtgctcgctttgctatatgagaatgcactgccactttatttacagtaagtgtatttaagtgaaatttaaaggaatagtgtagctatttaataactgttgaatggtagatttatgtttttttcttgcgattttttgtaggtcctgtgtctgatgatgagtcaccttctcctgattcaactacctcacctcctgaaattcaggcgcccgcacctgcaaacgtatgcaagcccattcctgtgaagcctaagcctgggaaacgccctgctgtggataagcttgaggacttgttggagggtggggatggacctttggaccttagtacccggaaactgccaaggcaatgagtgccctgcagctgtgtttatttaatgtgacgtcatgtaataaaattatgtcagctgctgagtgttttattacttcttgggtggggacttggatatataagtaggagcagatctgtgtggttagctcacagcaacctgctgccatccatggaggtttgggctatcttggaagacctcagacagactaagctactgctagaaaacgcctcggacggagtctctggcctttggagattctggttcggtggtgatctagctaggctagtgtttaggataaaacaggactacagggaagaatttgaaaagttattggacgatagtccgggactttttgaagctcttaacttgggtcatcaggctcattttaaggagaaggttttatcagttttagatttttctactcctggtagaactgctgctgctgtagcttttcttacttttatattggataaatggatccgccaaactcacttcagcaagggatacgttttggatttcatagcagcagctttgtggagaacatggaaggctcgcaggatgaggacaatcttagattactggccagtgcagcctctgggagtagcagggatactgagacacccaccgaccatgccagcggttctgcaggaggagcagcaggaggacaatccgagagccggcctggaccctccggtggaggagtagctgacctgtttcctgaactgcgacgggtgcttactaggtctacgaccagtggacagaacaggggaattaagagggagaggaatcctagtgggaataattcaagaaccgagttggctttaagtttaatgagccgcaggcgtcctgaaactgtttggtggcatgaggttcagagcgaaggcagggatgaagtttcaatattgcaggagaaatattcactagaacaacttaagacctgttggttggaacctgaggatgattgggaggtggccattaggaattatgctaagatatctctgaggcctgataaacaatatagaattactaagaagattaatattagaaatgcatgctacatatcagggaatggggcagaggttataatagatacacaagataaagcagtttttagatgttgtatgatgggtatgtggccaggggttgtcggcatggaagcagtaacacttatgaatattaggtttaaaggggatgggtataatggcattgtatttatggctaacactaagctgattctacatggttgtagcttttttgggtttaataatacgtgtgtagaagcttgggggcaagttagtgtgaggggttgtagtttttatgcatgctggattgcaacatcaggtagggtcaagagtcagttgtctgtgaagaaatgcatgtttgagagatgtaatcttggcatactgaatgaaggtgaagcaagggtccgccactgcgcagctacagaaactggctgcttcattctaataaagggaaatgccagtgtgaagcataatatgatctgtggacattcggatgagaggccttatcagatgctgacctgcgctggtggacattgcaatattcttgctaccgtgcatatcgtttcacatgcacgcaaaaaatggcctgtatttgaacataatgtgattaccaagtgcaccatgcacataggtggtcgcaggggaatgtttatgccttaccagtgtaacatgaatcatgtgaaggtaatgttggaaccagatgccttttccagagtgagcttaacaggaatctttgatatgaatattcaactatggaagatcctgagatatgatgacactaaaccaagggtgcgcgcatgcgaatgcggaggcaagcatgctagattccagccggtgtgcgtggatgtgactgaagacttgagacccgatcatttggtgcttgcctgcactggagcggagttcggttctagtggtgaagaaactgactaaagtgagtagtggggcaagatgtggatggggactttcaggttggtaaggtgggcagattgggtaaattttgttaatttctgtcttgcagctgccatgagtggaagcgcttcttttgaggggggagtatttagcccttatctgacgggcaggctcccaccatgggcaggagttcgtcagaatgtcatgggatccactgtggatgggagacccgtccagcccgccaattcctcaacgctgacctatgccactttgagttcgtcaccattggatgcagctgcagccgccgccgctactgctgccgccaacaccatccttggaatgggctattatggaagcatcgttgccaattccagttcctctaataacccttcaaccctggctgaggacaagctacttgttctcttggcgcagctcgaggccttaacccaacgcttaggcgaactgtctaagcaggtggcccagttgcgtgagcaaactgagtctgctgttgccacagcaaagtctaaataaagatctcaaatcaataaataaa

SEQ ID NO: 5 - DNA, 22697 bp, Human mastadenovirus B
tttaagagtcagcgcgcagtacttgttgaagagagcctcggcgtcctcgagagtgcgctgaagttggtcttcgctcttgtgatacaaacaacttctggtgagcgagcgcagagatcggttttttactttcagttcctgctcttgcccccgactctgctggaaaatggcatagagggttggaaagatccggttcctcagctctctggtctgcgctggctcgttcgctgtgatcctcagtcctcctcctggtgcacttgttgtggattttctaactgctggttttctggtcaccgttgtcgctgctgtatttttctgtcggggttgccgggacttgctgactgcagtaggggctgtggaggtgacggtagtaatgcaagatattgcgggggaagtttacaccgtggtggaagagcaggtatcgccgggtgaaggatatgttgcccccgcattcatgcaagcaggagatgatagcgtttttatgtccacgccaggacttgtatccctgtcgctccttcttaccggtcttggaagcggtggtcgggtttgggaatcgcccggtctcgtcccatctactgttgggccgccgctgggccccccgacccggagcggagatggtagccgtgctgctgtctggggacttgcttgtctccgccgccgatgacaactgtttggcggcggttgcttcttccacctcctctgcctcctcgtcttcctcctccaaactgtcttcctccaggctgtccacctcctctgcctggctgtcccaatcttccatctcctcctctgcctgactgtcccagtcttccttcatatcctctgggggcgacagctgcaccttcaacttcttgcttcctcggcgatgggacatcctgggggaaccttgtgttgagctcctcaccggtctgagggtcaaggtagaccccgtttcccttttttagcagaaattcttggcgagatttttggatggcttgcaattgggccagaattgctccctgggtgatgacgcaggctgagagctcgactttgggaggatgtgattggtcctcatagaacctgatctcatagggatggtagtcctcggggtgaaacttgcgcaggtaggcggaggtccacagccccggtgtcagtttcaaactctgccccggagaagacccctcgcctttacttctgggaccctgcagctcgaaggtgccgataatctgggtctcgctcagcaactgggggttgcaggcaagggagcggtggggtgtgcaaagattgcagcggcagtggcattccagcaggccgtctccgctcacatcctctataacatccgagtggtaggagaggtagttggccaggcggaacaggtagcagtggctccatagcggcggtgggcactcgcggtaggtgagaggcacaaagtcggagggcagcgcacagcaggtggcaggcaggataccggagcgttccaggatgaaagagcgaaagttgttaagcatgctctggctcataaagtctggcaggccgtttcgcagagtaaccctgagacgctcggggaagatgatgtctgccaggtccgaggcgacggtgcgctcatcaaaacctgtccacagggctttgagggatctctgcaagagcttgtccagctcttttaggttctgctcttccaaacactgttgccacacacccataccagtttgccaggtatggcagaggtagaggtagacacagtctcggatgtagtcacggcgggcctcccctttaagggtggtgtgcaggacgctctgccctagtcggttctcatgcaaaatgcccatgtaagaaaccaggttggtaagctccacgttggagatcttgcatgcctgccgcacgaagccatgtctaaaggtgtagtgcaggttctcctctagcttgcgcagggtctcagggtcggtgaaaaagcggcgcagacactccagctccacagttactagcactacagccatcataagcttgcgcctctcttccaaatctcggggggagttggtacccagccagcgagatagctgctcgtcactgactaccggcttgccctcgtccgaggcgtctggatcctgcatgttctggttttctgaaagaggtcttgctcgtttgatgagcagatggtccatgacagcgctcataactttggggggcaggttaacagcggggtaggcaaaatgggtgaccacgatactgcgcttgagcactgcaatccgggcattgtcaccctccagttccaccagagcgctgtggtgttcatccatgtcattctctccctgttgcagagcatttgcggcccgtgtctcatcacttcccagaccctcaaagatctttggaacctcttccaaggaagctatatcaggtaagcgagctcccggacccaagttgagcagggcatcggcgcgggtgcggttggcgcggcaggagactggaatcttttggttcttgaaaaagatgtggtaggtggccaacacttcggggatagtaaaagctggatagaagttgagtcgagggttggcctcgcaggtgccgtttggctgccgcttggggggtacctgaggcgaaaagaggttcagctcgtaggcgcggctaagctcttccacactgatgggcacttcagtgagatcgagcaatgcgtctttaactatgatcgactgccttgctagatgtttgaggagcacgtcctccccaccaaggccggtgaggtagtcggcgacatgatccctgatcccagcctcctggtaaacgccatctgcttgatgctctgggcggtcgtcatcctctctgtctagaaagcgtttcagctcctcctggtgctccgccggcgtcacatagcccgggtcctgctcgacatctgcctcaatctcttccgttttcacattatcctgcgcctgcatctcctgggctgcgtcgacctcctcctcatcatcgagggtagaggtggtggtagcgggactgggtggtggggtggttaagctctcctcctcgtcgctgctgggggcgaggtgtgatggtgcttgcagcgatgttggcagtgatggctgagtttccatgtctgttgtttctctgcctaggagaacacaatggccagccgcggaggaaatcagtcaagcgaccgccaccgggagcacacccccgaacgcggaatgagctctgccagccatccgcctccaaggccagaccgcagcccatctcagtcgcctccacctctgcccccgaagaggaacacctaccgtcgtgtggggtccggttcttctaccgagagccaggtggtattggtaagcgaaacttcgcagtcatccctgtctccggagcggagcaacagtcctcccccgatccctcccaagaagaagcccaggaagaccaagcatgtccctctgcaagacatcagccaggatagtgaagaagaaagagaacaggctcagttggtggccgtgggcttcagctaccccccggtgcgcatcattgagaaggatggcaagagaagtgttgagaagatcgacaagaatgaccctatagctaaaggagctacttttattgctgttaggaatcctttgagtctgcccctggtatctgcctgggagaagggcatggaagtgatggctgtgctaatggaaaggtacaggctggataatgatctgagaacctctttcaagctgatgccagagcagcacgagcaatacaagcgtatctgccaccagtatgtgaacgaggagcaccgtggcatcccgctgacatttaccagcatgaagaccttgacaacaatgatgggaagattcatgcagggattggtacattattattctgagatcgcccacaataattgggagtgcaccgggtgcgctctgtgggctcatggatgcaccgattatgaaggcaaggtgaaatgcctgcatggcactatcatgatccagaaggaccacattatcgagatggatgtggcgagcgagaacgggcagcgcgctatgaaggagaatccagacagagccaagatcacccaaaaccgctggggcagaaatgtggttcagttggccaacaacgatgcccgctgttgtgtgaatgatgccaactgtactactaatcaattttccagcaagtcctgtgggatgttctacaccgagggaagtaaggcccaggaagcttttaagcagtacgaagccttcatgaaggctgtgtacccagggataactcccgaccaagccaggatgatgctgatccccattcattgtgattgcaaccacaagccaggctgcgctcccgtgatgggcaggcagacatgtaagatgaccccctttgggatggccaatgctgaagacttggatgtgactaccatcagtgacccaaccgtgttggcaagcgtaagacacccagcgttgatagtgttccagtgttgcaacccagtgtatcgcaactcccgtgtccagaatgccggccccaactgtgatttcaagatctctgctcctgacctgcttggcgctatgcaactgaccagaaagttgtggcaagacacctttcccgagattccagttcccaagctggtaatccccgagttcaagtggcagaacaggttacagttccgcaacgtatccctgcccgcgggtcactctgactcccgccagaacccattcgacttctgagtaaatgatgaaacaaatgagcaaaaccagagcctcagtgcatgtaaaaataaagtgctgtttattgaacacggttttacatgacttattgcatatccatacggtcaaacgcggtggccctttcaatgcgcgcgcggtgagaacgaaagtaagatgagtgggtgtttaggaagcggtatagcacctcctggttgcggcgcagggtgggctggacttggggtgattggagcatgctgttggacaccccagtcagcaacttcatggtggggtttccgtccatggggcggtcgggccagtgcacaaaggcatgaaggaacatacagcaaaaaagtccacaggcggctgagcgcggaccctgcacgctttgggtagacttctccagggtgatgcagcggtctttggtagcaagggcactgcgacgcaggagcccctcgtactcaaactggtaaatctgtttgagccgctcatccgagaacccaaaaggatcaaaaaggtagcaggtgttgtagcgcgggttccaaccaaaagccagccagtgctctccccccgtctcgcgtccggcagtgttgactatggcgcaggcgagcttgtcgggggccatgaaccccgggaaacgcttgtcaaaggttcccaggaaatagggtccgcagcccaggtctcggacgatggctttgagctcttgctcgctggagccgtttccggacccgcatgtcatggctgcagctgctgcttgcaagaagcaagaggcttcttatgtggtggcgttgccggccgagaacggtgtgcgcaggtagacggcctcgatgacgccgcggtgtggctggtgcactctgaccacgtcgaagacttcgaaaagaagataaagcagggtgggctcatccatgggatccacctcaaaagtcatgtccagcgcatgggctgagttggcatagagcatgttctgtcccaggtcggtaagggcccccatggacatgaagttgctggagaagggaatgcgccacatggtcctgtcgcacaggaactttttctgggtgacactcttaacggcagtagttccgatgagcgggtatggataattggctgggtaaggttccccttgtctcatagtaggtgcaaggtaccctacaaagccagagttgttgtgttggtatggtaaggtgacggctttgtagtcagtgtaattaacctcatcaaccacctgcctgctcataggctggaagtttctgaaaaaggagtacatgcgatccttgtatccctcagggatgtaaaagccctggtagccaatgttgtaattggcaagcatctgaaccaggaaccagtctttggtcatgttgcattgtgccacgttgtatccttccccgtccacagtgcgcttgatttcaaactcatttggactcaacagcctgtcattgccaggccagctgactgaggagtcaaacatgatggagaccttcttgaaagtgtggttaaggtaaaaggtgccatccaggtagggaatagatccagaatatacgaagtagggatcgaaccctgatccaagagatggagtctccttggttttgagtctggtgaaggaccagcccctgaaggctgcccagttgcgagatgggatggaaattggaatgttggttgcattggcaggaatggggtaaagcatgttagctgcagagaggtagtcgttaaatgactgatcattggtatcgttgcgcagcatggcttcaagggtggaagctgtgttgtgagccatggggaagaaggtggcatagagattgatgctggtgaaacttatggtagcaccatccgttctgaggtcatttccaagggaactttgcaggaccatgttcacatcctttcggaagttccactcgtaggtgtaggagccaggtagaagaagtaggttcttgacagcaaagaatttctgaggcacttgtatgtggaaaggcacataacgaccatttcccagaagcatggacctgtagcgcagaccagcattgcggtggtggttgaatggattcacattgtccattgggtcaagagaccacctggcgccaatgttgatgtatgaatcaaccagggatggggataccactcgcccgttcatgtactcataggtgttggtgttagtgggcaaagtaatgttaggtggcgtgtacttgtaaacatctggaaggtacaaagccacattagagtacagaaaacttctccaaaggttagcttggatattaatttccatagccaggttgttgcctatggttatttcattagctggagcaacattagcatctttttcccatccattagtgtcatcggttttaactttaatgccttgatatgtgtgccctggtcctatgccattcagaggaaaacagtaattaggcagttcatcctcgatgccatgattttcaataatgcgaacatcgggatcgtaactgtccacagcctgattccacatgctgaagtatctggttctgtctcccagagaatcaagcaaaagctgatatgacagttcagtatttctgtcctgcaagtcaaccactgcattcagttgtgatgcttggccagccaaaactcccatatttccagtactgttgtagtacattaggcctacgaagttatccctgaagccaatgtaattgggtctgttaggcatggcttgttgacccaaatttgcatgagagttattagacgtttctggtttatataccacatgactgtctggagtttccaaatttacattttccgtataaagcacaatttcaggcgctaaagctcctgcaacagcatctctaccatcgaaaaattccatatcaatatctggttcctcagtttcaacccctccttcggttgttggttttacttttctgtttttagcttggcccccttttatgtttgtaggtcttgcaaaagacccgtagcatggcttcatgttggtagctggtttaagggctcttccaccaaacttttcatttgttccatcagtatcagtccatgattcttctccaacttgaggctctggctgatatgttttatcggcataaatgggcttttcttctccttcagtagtggtaatgtctttcccaatttgcaaaccttctttagtaatattgtctcccttcatggaagcaatgccaaatgtgtttgtggtggtagttactgcattgtccccatttgttgtaactatccactgagatgtattgggcgcgcccttaggagcgagtgaattgtaagctgtgccggaatatggcttgaagctaggacctctatcaagcaccccccgaatgtcaaagaatgtgctggccatgtcaagcactctgttgtcgcctacagccagcgtgtagcgaactttgtaagagtaggtattgtcttcccggtcaacgggcacgaagcgcagcatcaggcgctggctacggtcggtggtcacatcgtgggtgggcgccactgtggggtttctaaatttgttccccatactgaagtaggtgtctgttgcacgggcgaactgcaccagacccggactgaggtactccgaagcatcctgtccggcgatgtgcatgtatgcccattggggcatcatcgatggggtggccatcttgaaagcaactcagcctcggcgcgcgacctcttcctttctcctctgctgcggcggcgtggtgatgatacatacacacagacaagcaagttaagcgctactccatatttaattaatagcagcgacggcgctttacactctgcacgcccagacccacgatgctgttcagagtactttgccagtttgctttcgggcgcggtgtgcccccaggacgcggtctggctacggcgacgggctgtacggcggtgggctttctggtagcgacaggtttgggaacaggcgccgcagaagcagggggaggaggcaagtccaaggtggcgggtcgatgtgactgagaaggtttcatcaccccggtagccatgtgagctacaggcctggtagtgggcattccgagctttactgcctcctcatatgaagggggctcgtctgcgcgcgtcaccagcgtctgctctagctcgggtcgcggacgcttgtcgccccgcttttccagcggaggaagttcttcctccacttccatttcaccaggggttgcgggcggcgggtccaggcggctgtttatctgtttttgtacagcctggttggccagatccactacgccgttaataccagaggcgatcccatcgaccaccttctgttggaagttttgttccttaagcttatttctcagagcctgccctgtgctgctgttccaagctttgttcccataggtttttacggtcgagccaaaatttttaagcccgctccagatactgctccaattgaaggcgcccccgttcagttggctcgtgccgatgtcgctccaggtgcccatgtacggcctcgtgccgtgtcgcggagccagggatgaaaaattgatgtcttccatctctacaaaaacatagtcacaggaccaggagcgtcagagtccattctattttttatttataagttttttccaatgttagtggcgctgcgaggcctgaaccgccactgaagctatgcctggtatcgccccgatcgctgcggcgatgatgggtataagagctggcaaaaagccaccccctaatcgtctgctgatagcgcgccttcgtctgtggcggcgcatccctcgccccaacatccttctacggcgcgagtttcttcctcggtagccagtaatggggacgcgaaggcggcaagtgagggccatatctgcaaggaggcagcgtcaacagtcattaagtggtgatgcttggatggtagcgcgcgcgcggcagcgtcagaggttcagcgcgaccatcgcggtacactctccgcaccagggcggcgggagtcaatttgctggcagtgttgcggcggcggcgacggcgagtgcgacttgcaggtggtttgcggcggcgagaggtgttgctccggtttcgatagtagcgagtgcctctgtaacccggagtgggaatgatggatgggtgcagagcatagttgggcattagcagacttgctgggccgtactttcgtcgtgatcttcgagtggtgctgggggcggcaacgggcgcgggcatccagggttccgtttgcacctcaattgaggtggtgggttttgcaggttcggtctgcacttccatggactcggtgggaatcttgatgtcgaaggtttgtactcccaaacctggcgccacttccttgataggtcttactttgacctcaggctggatatcggcatccactttcattttctccagtacgtcttctagcctctggcgcttgggcaccattagctgcatggtgggatataggtcctcaccctcgcgctttacgcctctccgcgcaggcacgggcagcacttgctgcagggtgactggtttgaggctgggggtgggatttccatgatccaaaggaatggacacagcctcctctttgggactggatctagtgcgcttgccataagcaaactcgtcaaggcggtctgccgcctgctcaagaatatcgtcatccccgtacacctcatcataggaccgtttaaaagtagtgctggaacgctcgccaggtgtaaaaaccacagtggtcccgggtctgagcacttgacgcactttgcgcccgcgccactgcacgcgccgtcttggggcgaactcgcgcacaaactccaccagcccatcatcgtcatcttcttcctttttgttatttttgacccgcttgattttgcggggctttttttcatccttcaccggcggaccgtagatttcaggcgcgatgacctggagcatctcttccttgtatttgcgcttggacatacttgccgctgggacacaacatcggagactgctcagtatcttctaagtgcgaggggggcgggtgcgcacgggcacgcgctggccggtagtggcatcacgcacccagtacacattgcctcttcgcggttgggccatgttggcaatggccgctgctgccgccgtggccgcgcgcctgcgggacctgccgctgctggcacctgaagccgcgcgtctggccgctctaagcatggctcttcgccccacacgtttggccctccgcagaatagcttttgcggctcgcatggcgggagtagccctgtggcgcctggcgatgcgcctccttcggctcttccggcgagcataggcgcgggcgtctgccaccacactgtcaataactgcatccacagtagatgtaggcgcagtaggagtataattacgagcatcggcgaccacctggtcgatcacatcatcgaccgtggtccgagtgcgggtacgacccttgagtgcgccccagggagcgcggaaatgaccgcgaacgcgcacaggatgctgggtagagcgcttgcgggcgcctccatacatcttggtgggcgcatacagtccccaaccggtattattactgggcgagatgagaatggacattttttttttttttagaaagtgcggcttgaaagaacgcgcggcgcgactatgcccagggccttgtaaacgtagggacaggtgcggcgtctggcgtcagtaacggtcacgcgctggactccccggatactgctgcgtaacggcagggtcccgtgatctgtgagagcaggaacgttttcactgacggtggtaattgtgggcgccggcgggcggatgaggatctggttctcagggaagcggttgaagacgtgcgtgagcgaagtggcctgtcggagctgctgagagtacacggcttgctcattgtagaaactctttgagaagacgggcataagctctgcacccaccactgggtagttgttgacttgtcttgtggagcggaaggtgactgggtcttgcatcatgtcagggagcgaccagtagacctgctctgccccacaggtgacatctgaagtggtgagcagtgtccaagaccttattcctttctcagggttaccgtaattgtaggacaggtaccaactgcggtaggctgtgttgattttgtcttccaagacattgtagcttctactcttgctgtctttttctagaggttggatctttaactcttttttaacttcagcagctgcagcttcacgtttttgtttttcagttatataggtatctcctctagttatatcatcatcttcactagtttcctctgcaacagccagtgtggttgtttcagtagtggtatcctttttgctttcctcataggcagtgacatccaaaagggcaggaatattacccccttcaagatcttcatacatgattttgaaaccctcctggaatggatgtctcttcctgatgccaagcaagttgctaagtcggctttcagtaaagtctaccccgcaaccaggcagcaatacaatgtcaggatggaatgcctcataagtgtagacacctggcataatcaacttagtttcggggtcccacccgagcctgaaatttctagtgtcaaacttaacaccaatgtcactttccagcactccattctgtctgccaatttccaggtagttgtcaatgatggcattgttcatcaggtcgatcgtcatggtggctgaaaagttgccttctggtaaaatgaactcaaaccactcatacttcaagatatcctctttatgatcataggtgtcatttactgtaacaccttcaggagcttttctggacaccatcaccctcgccttgaacttgttgctgaacatgtactcgttcacgttgggcatgttggtgtgcatgatggtcttcagctgaccgccccatcgcgaccgctcgtcaaagttgatggtctgggtgctagcctccgtgggggtaaagtcattgttctgcaccaccgtggtcaggaagttgctgtggtcgttctgatagttcagggaggcgatgtccgccgacttgttgtccaccagatacaacttggtggtatcgtacaggggcgacagctccgagtaacgaatgctgtttctcccttccgtaggcgccaggtaccgtgggggtacgaagggagcctccagtgggggctgtatcatcgccgcctgttgctgcatcacgctctcgtaagaaggaggaggaccctccggatacaccaccgctccgcctagcacggctcgtctcctcatcgtactagacacagataacaaaaaagaacgaacgcacgctcggtcgccatggccttggtgagttgcctttttattttactttcacttttacaacatgcgcccgaatctgggacgcagatgagcgaacgggttgccccctcctcttccacccaagtccaacacgctgctatcatcggcagagtcctcatcgtcccacacaagacccatctgcctgtcgtggcgctggcgtctacggatcggtctgcttgtagcccccaagatcctgggctcgtctctgtgatcctgcgcataggtcttccatctactcatcttatccaccagactctctattccattgttggggaagttcttttccctctctggcctcagcaaagagtcattcaagtactcatcctcgcccatcaagcgcgggcgggttattctccccagttcactgctgcgaacgctgtttagtgaaaagggcaagctagggaaaggacttgcagcttcgggcacggtcgcggcagcaccagccgttccggatagcgacacggaagagtgtcttctatcgcccccttccttcttccaaactgtataaccgggaggcggggaaaatatgctgctgtccacatcgtcccacaggaacccgtcattggggtcgggcatgtcgtactcgccagtgtagaaaccaggtgggggcagccagtgtgggttcaggatagcattggtgaaataatcagagttcatggcggccgccctgtgcaggtagtccagcagtttgttaatgaaaggcctgttactagcatacatgctgggctccatgtttcgagctgtcatgtccagcgcggcggtaggtgtcgccccctcctgcatcaggaacagtccaacgctctgttgcacgtatctgaggatccgctcctcctcagcggtaagcgcatactgaggagggatcttctgtgaccggttggttagcaagaagttcagggtggcttccaaactgcccgtgtcttcctgacccagggcgcggctcacttgggtgatttcttgataggtctgctcgtccacctggctctgtcctatggcctcgcgatacaggttaagcaggtagcccaagtacgagttgcggtcaatgctaccgctgtcagtaaagggggataccagcagcagcagcaggcgggagttgggagtcagcaagctagacacggtcgcgcgatcccctactggggcgtgcactccccacagacccttcaggttcttgaaagcctgagtcaggttcactgtctgcaagccctgtctgctggtctggaagaagtaatctggcccggactggtacacctcgctctggggcacctcagctaccatgagtctcaatgcactcaaaaagtttgtatagtcttgctgaccacggggcacgttggcgggctgggtgctgaggaaagcgtttagcgctaccaacgaccccaagttggcgtcgcgctggaatcgctcgcgctgagacacggcctcgcgcacatcggtcaccatccggtccaggttggtttgcacgttgctgctgttgtaacgggccacgcgctccaagagagcattgtataccagcccggcctcatcgggacggatggccttgttctccaccagcgcgttcacgatagccaggaccttctcgtgggtggggttggagcgggagggcactacggcctccagtatggcagaaaggcggttggcctggggttgctgtctaaaggcttcggggttgcgggtcgtcagcgccattatgcgttgcatggcctgggtccaatcgtccgaggagttaatgccggacggctggctctgcagcgccgcccgcattgcggggtccggtgcctgctgctgttccatctagcaaaaatacgggtcgcgccatcagtcttccaagtactcgccctcctcgtcctcgacttcatccacctcttctatgtaaggaagctcacaccctgcagcctccatggccctgcgactgggttgccattgcaaatccgctcccatgtcaaagtagttctccccatcagtcccggcccccgttagagctctttgcaagctgtgcataagttctctgtcgctcagctcgcgcctcctgctggcgctcaccgcgcggtgcatcctgtcattgcgatacacccccagatcgtcgctcagagtcagcaccttcagagtcatgcgcatgtaaaacccatctatcttcacctccttgtctatgggtacgtagggggtcttgtagatcttgcgagcgtagtatttgcccaggctcaagaccgagtagttgatagctgccactttctcagccaaacccaggctacgttcctgcactataatactttgcaggatgttgatcagatcatacagccatctcccatcaggctcggtgatgttcaacaacgcctccctgaatgcctcgttgtccctgctatgttgaaccaccagaaacagctgagctgtcagtggtttgctagtggggttttgggcgatagcctccatcaggtcccacagatgcatcagacccagggtcacttcctcgcgggcgatcagggtgcgcacatggttgttaaaagatttttggaagttgcgctcctccttcacggtctgctcgtaggccgagactaggttggccgcggccacatgtgccctagctgggctgatccctgtgacttcatcgacctcaaaatcctcgtcttgcagcacccgtcttcgatccagaccgtggcgcagctcgcgacccgcgttaaatcgagatgctcgcatctcctctggctcctcgccgctcctgtccctgaacaggttctgctggggcacgtacgcctcgcgagagtccttttttagttgcacccgcgggtgccgctcgggcgatggagcccccaggcgcgccaatccctcgccctcttccaagtccagatcataggcgggctgtcccgcgccgctcacggctgcagctgcagtagttgcaggagcaagaagagccttttgtggctgttgctgagaaggggcctgttgctgggggcgcatctgtcgcagcactggatgcatctgggcgacaaaaacaaaaaaaaaaaaaaaagggctcgctcccgtaaactggagaagtcggctggcggggtcttggaaataacggggctgccaaaccctcgcttgtcgcggaaaccggccgatacgagccgcgcttaggctccaaccggggcataccgcaacgcaaccctggcgactgattctccagactacgggcgcgagccactcacggcccgagaactgagcgttctaaagcttgacgtggcaatggcacacgtccaggaaaaagcagcaaaaacgactctactccgtaccctggatattcgtcggctgggtcgagacgggatagccaataccacgttagccgcggctccggccgatccgagcgtgatcgcttagctttggactcgaaccggggtacaccgcgacccaacccgttcacgttcccccagaccacggagtcgagccgctcatcgctttcgttttctccgtgtctacagagcgtcaatgactgcgcgcgcctcactggccagaccgtgcctaccatgaactacttcatgccgctgcgcaacatctggaaccgcgtgcgcgagttcccacgtgcatccaccaccgcctccggtatcacctggatgtccaggtacatctacggctaccaccgcctcatgctggaagacctcgcccccggagccccggctacagagcgatggcccctgtaccgccagccaccgccacactttctcattggctaccagtacctggtgcgcacctgcaacgattacatctttgacacccgcgcatactcgcgcctcaagtacaccgagctcgtgcgccctgggcaccagacagtcaactggtcagtcatggccaactgctcctacacaatcaacaccggggcctaccaccgcttcgtggactttgacgacttccaagccaccctcacccaggtgcagcaagccatcctcgccgaaagggttgtagcggacctggcacttgtccagcccatgcgcgggttcgggatcactcgcatgcatggcagagcgggcgaagaagaagtgcccgtggaacgactcatgcaagactactataaagatctggccagatgtcaggataatgcttggggaatggctcatcgcctgcgtatccaacaagccggacccaaagacctggtgctcctcgccaccatccgccgtctcaaaactgcctattttaatttcatcaccagcagcatcgtctcaccctcccaagaggaggaaggagaagaaagagagaaccccgaccgagcgtctagccgcccccgcccgcaagaaacagtgctcagcctaccttgcgattgcgactggttagacgctttcgtcgaaaggttttcagatcccgtggatcttgagacgatcaggtccttgcgcggagtacctacggggcaattgataaaatgcataatcagcgcggtgtccctgcccaacggagagcctcccagtcaccacttcagggagatgcgcggaggcgtcttcactctgagacccagggagaacggtcgtgccgtcaccgagaccatgcgccgccgccgcggagaggtcattgaaagattcatcgaccgtctgcccgtgcgccgccggcgtcgccgcgttccccctcctcctgcagccccacctgaagaggaagagatgttagtggaagaagaagagattgaggaagaaatcccaggggctttcgagcgcgaggtgcgcaccaccatcgccgaacttatccgtcttctggaagaggagttgaccgtgtccgcgcgtaactcccagttttttaactttgccgtggacttctacgaggccatggagcgcttggaagcgctgggcgatgtcagcgagatgccgctgagacgatggatcatgtatttcttcgtcaccgagcacatcgccaccacactcaactaccttttccagcgcctatgcaactatgcggtcttcacccgccacgtggagctcaacctcgcccaggtggtcatgcgcgcgagagatcccgtgggggctgtggtctacagccgcgtctggaacgaggcgggcatgaatgcattctctcaactcattgggcgcatctccaacgacctcgcggccaccgtcgagagagcgggccgcggagatcttcaagaggaagagatcgagcagttcatggccgagatcgcctaccaggacaactctggcgacgtgcaagaaatccttaggcaagccgccgtcaacgataccgagattgattctgttgaactctctttcaggttcaagctcacggggccggtagctttcacccagaggcgtcagatccaggatgtcaaccgccgcgtcgtcgcgcatgcgagtcttctcagggcgcagtaccagaacctacccgcgcgcggcgccgacgtaccactgccagccatgccgccgggtcccgagccgcccctgccgcccggtgcgcgccctcgacaccgcttctaaacatgcaagaagcaacagagccaccgccgtccaaaatgaaaaacaagggcacggtggtagcgcccaagggacacggaaccctgcaagccatcgacatctccaccaacggacccgttgagatcaagtactatctgaacctccctcacgccctccaaaagatcatgcaagttaatctcctgacactgcctactaacctgactccgcagcgtctcaggaccctggacagctccggcctgcgcgctctcgtcctcgagctccgcccctgccgcgccgaggtctggacttgcctcccgcgagggctcgtcagcatgaccaccatcgagacagaagatggtcatgccgatgcagacaacatagtaaagcgcgaggtacaagcgccaggcctcaattttccactgaaatttctcgtcaaaggaagtcaggtacaactcattcataaggtgcatcccgtgaatcgctgcgagtactgcggccgtctgtacaagcacaagcatgaatgctcggcgcgtcgcagggagttctacttccatcacatcaacagccattcctccaactggtggcaggagatccagttcttcccgattggctctcatcctcgcacagaaaggctctttctcacctacgatgtggaaacctacacctggatggggtcctttggcaagcagctaatccccttcatgctggtcatgaaactctctggagaccagcggctcgtcaacatcgcctatgacctcgccataaaactcaagtgggatcgctggcggcaggacccccaaaccttctattgcgtcaccccagaaaagatggcagtcggacagcattttcgtcagtaccgggaccagttacaaacagcactggcagtggacctctggtcctccttccttaaagcgaaccctcacgtgcacgaatgggccctcgaacactatgctctcactgaccctacagatctcacttttgaagaactcaagaagctgcctcatgtcaggggcacccctcgattcttagaactgtacatagtggggcacaacatcaatggctttgatgagatcgtcttggccgctcaggttatcaataaccgagcagaggttcctcagcctttcaaaatcacccgaaatttcatgcccagggccggcaagatcctcttcaatgatgttactttcgctttgcccaaccccgcctacaagaagcgggtggacttccaactctgggaacagggggcctgtgatgacatcgacttcaagtatcaattcctcaaagtcatggtcagggacacttttgccctcactcatacctcgctgcgcaatgcagcccaagcatactctctcccagtggagaagggatgctgtccctacaaggcagtcaatcagttctacatgttgggctcttaccgtgcagaaaaagacgggtttcccctcgaagagtactggaaggatcacgaagaataccttctcaaccgcgagctgtgggaaaagaaaagccaaccgcgttatgacatcatccaggaaactctcgactactgtgccctggatgtactcatcaccgccgagctggtagccaagctgcaagagtcatatgcccacttcataagggactctgtaggcttacctcatgcccattttaacatattccagagacctactatctcttccaattcccatgccatctttcgccagatcgtttacagggcggaaaaacccaaccgcaccaatctgggcccgggtcttcttgccccctcacatgaactctatgactatgtgcgagcaagcatcagaggggggcgatgttatcccacttacatcggcatcctcgaagagcccctctatgtctacgatatctgtggcatgtatgcctccgcgctcacccaccccatgccctggggcacccctcttaacccctatgagcgcgcgctggcagttcgagaatggcagatgaccttggatgatcccgccaccatcagctattttgacaaagatttgctaccgggaatatttaccatagatgcggacccccctgatgagttcatgctagaccccctcccccctttctgttcaagaaaaggaggtcgactctgctggaccaatgagcccctccgaggcgaggtggccaccagtgtggatctgataaccctgcacaataggggatggcgaatcagaatagttccggatgaactgacaaccatctttcctgaatggaaatgtgtggcgcgcgagtacgtccagcttaacatcaccgccaaggagcgcgcggacaaggaaaagaaccaaaccatgcgctccatcgccaagcttctatccaatgccctctatggatcatttgccaccaagctggacaacaagaagattgtgttttctgaccagatggacgagagtcttatgaaaggcatctctgctggtactgtcaatatcaaatcctcctcgttcctagaaactgacaacctgagtgcagaggtcatgcccgccttcgagagggaatacctaccccaacagctggcgctcctggacagcgatccggaagacagtgaggacgaacagaggcccgcccccttttatacccccccggcggggacccctggtcacgtggcctacacttacaagccaatcacattcttggatgtggaggagggggacatgtgtttacataccgtagagaaggtggaccccctggttgacaacgaccgctacccctcccacgtggcctcctttgtgctggcctggacacgcgcttttgtatcagagtgggctgggttcctctacgaagaggaccgaggcactccgctcgaggacaggcccataaagtcggtctacggggacacggacagcctctttgtcacccagcggggacacgaactcatggaaaccaaaggtaagaaacgcatcaaaaaacatggcggaaaacttgtttttgaccccgatgagccggatctgacctggctcgtggagtgcgaaaccgtctgcgcctcctgcggtgcggatgcatactcccccgaatccattttcctcgcgcccaagttgtatgccctcaaatgtatctactgccccgcctgccataaaacttccaaaggtaagctccgtgccaaaggccacgcggccgaggcgctcaactacgaactcatggtaaactgctacctggccgacatgcagggcgccaatcggcagcggttctcgaccagcaggatgagtctgaagcgcaccctcgcaagcgcccaaccaggcgcgcaccccttcaccgtgacggaaacaaccctgactcggacgctgcgaccatggaaggatcggaccctggcagcgctggacgcccatcgtctgattccctactccaggagccgtcccaacccgcgaaacgaggaggtctgctggatcgagatgccatagagcacatcaccgagctctgggaccggctcgagctcttgcaacagactctttccaaaatgcccatggctgacgggctgaagccgctgaaaaacttctcctcgctccaggagcttctatcccttgggggagagcgcctcctaacggacttggtgcgggaaaatatccatgtaagggaaatgatgaacgaagtggcccccctgctccgggaggacggcagctgtcgttccctaaactaccatctgcaacccgtaattggggtcatttacggtcccactgggtgcggcaagtctcagctgcttaggaatttgctctcgtcccagttaatcaccccggctccagaaacggtattttttatagccccgcaggtggacatgatccccccctctgaactgaaagcctgggaaatgcaaatatgtgagggaaactatgctcccgggccagagggaactttcatcccccaatctggcaccctccgcccaaagtttattaaaatggcttatgatgacctgactcaggagcataactatgatgtttcagacccccggaacgtgttcgcccgtgccgctgcccacggccccatcgctatcattatggatgagtgcatggagaatctggggggtcacaaaggcgtctccaaattttttcatgcttttccctctaagctgcatgataaatttcccaagtgcaccggatacactgtcttggtggtcctgcacaatatgaacccgagacgggatctaggcggcaacattgccaacctcaagatccagtccaaaatgcatataatttcaccccggatgcacccgtcccagctcaacagatttgtaaacacctacactaagggcctccccgttgcaattagtctgctcctaaaagatattgtgcaacaccatgcactccgaccttgctatgactgggtgatttataacactaccccggagcaagaggctcttcaatggagctatctccacccccgagacggactaatgcccatgtatctaaacattcaatcccacctttacagggtactggaaaagatccaccgcgttctcaatgatcgagaccgatggtccagggcataccgcgcgcgaaaaatcaaataaa

SEQ ID NO: 6 - DNA, 4102 bp, Human mastadenovirus B
tataaaacgcctggtgattagaggccgaggtatccagctcaacgacgagtcggttagctcttcgcttggtctgcgaccagacggagtcttccaaatcgccggctgtgggagatcttccttcactcctcgtcaggctgtgctgactttggagagttcgtcctcgcagccccgctcgggcggcattggaactctccagtttgtggaggagtttactccctctgtctacttcaaccccttctccggctctcctggccagtacccggacgagttcataccaaacttcgacgcaatcagcgagtcagtggatggctatgattgatgtctaatggtggtgcggctgagctagctcgactgcgacacctagaccactgccgccgctttcgctgcttcgcccgggaactcaccgagttcatctacttcgaactctccgaggagcaccctcagggtccggcccacggagtgcggattaccatcgaagggggaatagactctcgcctgcatcgcatcttctcccagcggcccgtgctaattgaacgcgaccagggaaatacaaccatctccatctactgcatctgtaaccaccccggattgcatgaaagcctttgctgtcttgtttgtgctgagtttaataaaaactgagttaagaccctcctacggactaccgcttcttcaatcaggactttacaacaccaaccagatcttccagaagacccagacccttcctcctttcatccaggactctaactctaccttaccagcaccctccactactaaccttcccgaaacaaacaagcttgcatctcatctgcaacaccgcctttcacgaagccttctttctgccaatactaccactcccaaaaccggaggtgagctccgcggtcttcctactgacgacccctgggtggtagcgggttttgtaacgttaggagtagttgcgggtgggcttgtgctgatcctttgctacctatacacaccttgctgtgcatatttagtcatattgtgctgttggtttaagaaatgggggccatactagtcgtgcttgctttactttcgcttttgggtctgggctctgctaatctcaatcctctcgatcacgatccatgtttagacttcgacccagaaaactgcacacttacttttgcacccgacacaagccgtctctgtggagttcttattaagtgcggatgggactgcaggtccgttgaaattacacataataacaaaacatggaacaataccttatccaccacatgggagccaggagttccccagtggtatactgtctctgtccgaggtcctgacggttccatccgcattagtaacaacactttcattttttctgaaatgtgcgatctggccatgttcatgagcagacagtatgacctatggcctcccagcaaagagaacattgtggcattttccattgcttattgcttggtaacatgcatcatcactgctatcatttgtgtgtgcatacacttgcttatagttattcgccctagacaaagcaatgaggaaaaagagaaaatgccttaacctttttcctcataccttttctttacagcatggcttctgttacagctctaattattgccagcattgtcactgtcgctcacgggcaaacaattgtccatattaccttaggacataatcacactcttgtagggcccccaattacttcagaggttatttggaccaaacttggaagtgttgattattttgatataatttgcaacaaaactaaaccaatatttgtaatctgtaacagacaaaatctcacgttaattaatgttagcaaaatttataacggttactattatggttatgacagatccagtagtcaatataaaaattacttagttcgcataactcagcccaaattaacagtgccaactatgacaataattaaaatggctaataaagcattagaaaattttacatcaccaacaacacccaatgaaaaaaacattccaaattcaatgattgcaattattgcggcggtggcattgggaatggcactaataataatatgcatgctcctatatgcttgttactataaaaagtttcaacataaacaggatccactactaaattttaacatttaattttttatacagatgatttccactacaatttttatcattactagccttgcagctgtaacttatggccgttcacacctaactgtacctgttggctcaacatgtacactacaaggaccccaagaaggctatgtcacttggtggagaatatatgataatggagggttcgctagaccatgtgatcagcctggtacaaaattttcatgcaacggaagagacttgaccattattaacataacatcaaatgagcaaggcttctattatggaaccaactataaaaatagtttagattacaacattattgtagtgccagccaccacttctgctccccgcaaatccactttctctagcagcagtgccaaagcaagcacaattcctaaaacagcttctgctatgttaaagcttccaaaaatcgctttaagtaattccacagccgctcccaatacaattcctaaatcaacaattggcatcattactgccgtggtagtgggattaatgattatatttttgtgtataatgtactacgcctgctgctatagaaaacatgaacaaaaaggtgatgcattactaaattttgatatttaattttttatagaattatgatattgtttcaatcaaataccactacctcctatgcatacacaaacattcagcctaaatacgctatgcaactagaaatcacaatactaattgtaattggaattcttatactatctgttattctttattttatattctgccgtcaaatacccaatgttcatagaaattctaaaagacgtcccatctattctcctatgattagtcgtccccatatggctctgaatgaaatctaagatctttttttttttctcttacagtatggtgaacatcaatcatgatccctagaaatttcttcttcaccatactcatctgtgcttttaatgtctgtgctactttcacagcagtagccactgcaagcccagactgtataggaccatttgcttcctatgcactttttgccttcgttacttgcatctgcgtgtgtagcatagtctgcctggttattaattttttccaactggtagactggatctttgtgcgaattgcctacctacgtcaccatcccgaataccgcaatcaaaatgttgcggcacttcttaggcttatttaaaaccatgcaggctatgctaccagtcattttaattttgctactaccctgcattcccctagcttccaccgccactcgcgctacacctgaacaacttagaaaatgcaaatttcaacaaccatggtcatttcttgattgctaccatgaaaaatctgattttcccacatactggatagtgattgttggaataattaacatactttcatgtacctttttctcaatcacaatataccccacatttaattttgggtggaattctcccaatgcactgggttacccacaagaaccagatgaacatattccactacaacacatacaacaaccactagcactggtacagtatgaaaatgagccacaaccttcactgccccctgccattagttacttcaacctaaccggcggagatgactgacccaatcgccacatcatccaccgctgccaaggagctgctggacatggacggacgtgcctcagaacagcgactcatccaactacgcattcgtcagcagcaggaacgagcagtaaaagagctaagggatgccattgggattcaccagtgcaaaaaaggcatattctgcttagtaaaacaatccaaaatctcctacgagatcaccgctactgaccatcgtctctcatacgagctcggtccgcagcgacaaaaattcacctgcatggtgggaatcaaccccatagttatcacccagcagtctggagatactaagggttgtatccagtgttcctgtgattccaccgagtgcatctacacactgctgaagaccctctgcggccttcgagacctcctacccatgaactaatcattgcccctaccttacccaatcaaaatattaataaa

SEQ ID NO: 7 - DNA, 960 bp, Human mastadenovirus B
atggccaagcgagctcggctaagcacttccttcaacccggtgtacccttatgaagatgaaagcagctcacaacacccatttataaatcctggtttcatttcccctgacgggttcacacaaagtccaaacggggttttaagtcttaaatgtgttaatccacttaccactgcaagcggctccctccaacttaaagtgggaagtggtcttacagtagacactactgatggatccttagaagaaaacatcaaagttaacacccccctaacaaagtcaaaccattctataaatttaccaataggaaacggtttgcaaatagaacaaaacaaactttgcagtaaactcggaaatggtcttacatttgactcttccaattctattgcactgaaaaataacactttatggacaggtccaaaaccagaagccaactgcataattgaatacgggaaacaaaacccagatagcaaactaactttaatccttgtaaaaaatggaggaattgttaatggatatgtaacgctaatgggagcctcagactacgttaacaccttatttaaaaacaaaaatgtctccattaatgtagaactatactttgatgccactggtcatatattaccagactcatcttctcttaaaacagatctagaactaaaatacaagcaaaccgctgactttagtgcaagaggttttatgccaagtactacagcgtatccatttgtccttcctaatgcgggaacacataatgaaaattatatttttggtcaatgctactacaaagcaagcgatggtgccctttttccgttggaagttactgttatgcttaataaacgcctgccagatagtcgcacatcctatgttatgacttttttatggtccttgaatgctggtctagctccagaaactactcaggcaaccctcataacctccccatttaccttttcctatattagagaagatgactga

SEQ ID NO: 8 - DNA, 270 bp, Human mastadenovirus B
aacggggttttaagtcttaaatgtgttaatccacttaccactgcaagcggctccctccaacttaaagtgggaagtggtcttacagtagacactactgatggatccttagaagaaaacatcaaagttaacacccccctaacaaagtcaaaccattctataaatttaccaataggaaacggtttgcaaatagaacaaaacaaactttgcagtaaactcggaaatggtcttacatttgactcttccaattctattgcactgaaaaataacact

SEQ ID NO: 9 - DNA, 561 bp, Human mastadenovirus B
ttatggacaggtccaaaaccagaagccaactgcataattgaatacgggaaacaaaacccagatagcaaactaactttaatccttgtaaaaaatggaggaattgttaatggatatgtaacgctaatgggagcctcagactacgttaacaccttatttaaaaacaaaaatgtctccattaatgtagaactatactttgatgccactggtcatatattaccagactcatcttctcttaaaacagatctagaactaaaatacaagcaaaccgctgactttagtgcaagaggttttatgccaagtactacagcgtatccatttgtccttcctaatgcgggaacacataatgaaaattatatttttggtcaatgctactacaaagcaagcgatggtgccctttttccgttggaagttactgttatgcttaataaacgcctgccagatagtcgcacatcctatgttatgacttttttatggtccttgaatgctggtctagctccagaaactactcaggcaaccctcataacctccccatttaccttttcctatattagagaagatgac

SEQ ID NO: 10 - DNA, 1635 bp, Human mastadenovirus B
atgaggagacgagccgtgctaggcggagcggtggtgtatccggagggtcctcctccttcttacgagagcgtgatgcagcaacaggcggcgatgatacagcccccactggaggctcccttcgtacccccacggtacctggcgcctacggaagggagaaacagcattcgttactcggagctgtcgcccctgtacgataccaccaagttgtatctggtggacaacaagtcggcggacatcgcctccctgaactatcagaacgaccacagcaacttcctgaccacggtggtgcagaacaatgactttacccccacggaggctagcacccagaccatcaactttgacgagcggtcgcgatggggcggtcagctgaagaccatcatgcacaccaacatgcccaacgtgaacgagtacatgttcagcaacaagttcaaggcgagggtgatggtgtccagaaaagctcctgaaggtgttacagtaaatgacacctatgatcataaagaggatatcttgaagtatgagtggtttgagttcattttaccagaaggcaacttttcagccaccatgacgatcgacctgatgaacaatgccatcattgacaactacctggaaattggcagacagaatggagtgctggaaagtgacattggtgttaagtttgacactagaaatttcaggctcgggtgggaccccgaaactaagttgattatgccaggtgtctacacttatgaggcattccatcctgacattgtattgctgcctggttgcggggtagactttactgaaagccgacttagcaacttgcttggcatcaggaagagacatccattccaggagggtttcaaaatcatgtatgaagatcttgaagggggtaatattcctgcccttttggatgtcactgcctatgaggaaagcaaaaaggataccactactgaaacaaccacactggctgttgcagaggaaactagtgaagatgatgatataactagaggagatacctatataactgaaaaacaaaaacgtgaagctgcagctgctgaagttaaaaaagagttaaagatccaacctctagaaaaagacagcaagagtagaagctacaatgtcttggaagacaaaatcaacacagcctaccgcagttggtacctgtcctacaattacggtaaccctgagaaaggaataaggtcttggacactgctcaccacttcagatgtcacctgtggggcagagcaggtctactggtcgctccctgacatgatgcaagacccagtcaccttccgctccacaagacaagtcaacaactacccagtggtgggtgcagagcttatgcccgtcttctcaaagagtttctacaatgagcaagccgtgtactctcagcagctccgacaggccacttcgctcacgcacgtcttcaaccgcttccctgagaaccagatcctcatccgcccgccggcgcccacaattaccaccgtcagtgaaaacgttcctgctctcacagatcacgggaccctgccgttacgcagcagtatccggggagtccagcgcgtgaccgttactgacgccagacgccgcacctgtccctacgtttacaaggccctgggcatagtcgcgccgcgcgttctttcaagccgcactttctaa

SEQ ID NO: 11 - DNA, 2835 bp, Human mastadenovirus B
atggccaccccatcgatgatgccccaatgggcatacatgcacatcgccggacaggatgcttcggagtacctcagtccgggtctggtgcagttcgcccgtgcaacagacacctacttcagtatggggaacaaatttagaaaccccacagtggcgcccacccacgatgtgaccaccgaccgtagccagcgcctgatgctgcgcttcgtgcccgttgaccgggaagacaatacctactcttacaaagttcgctacacgctggctgtaggcgacaacagagtgcttgacatggccagcacattctttgacattcggggggtgcttgatagaggtcctagcttcaagccatattccggcacagcttacaattcactcgctcctaagggcgcgcccaatacatctcagtggatagttacaacaaatggggacaatgcagtaactaccaccacaaacacatttggcattgcttccatgaagggagacaatattactaaagaaggtttgcaaattgggaaagacattaccactactgaaggagaagaaaagcccatttatgccgataaaacatatcagccagagcctcaagttggagaagaatcatggactgatactgatggaacaaatgaaaagtttggtggaagagcccttaaaccagctaccaacatgaagccatgctacgggtcttttgcaagacctacaaacataaaagggggccaagctaaaaacagaaaagtaaaaccaacaaccgaaggaggggttgaaactgaggaaccagatattgatatggaatttttcgatggtagagatgctgttgcaggagctttagcgcctgaaattgtgctttatacggaaaatgtaaatttggaaactccagacagtcatgtggtatataaaccagaaacgtctaataactctcatgcaaatttgggtcaacaagccatgcctaacagacccaattacattggcttcagggataacttcgtaggcctaatgtactacaacagtactggaaatatgggagttttggctggccaagcatcacaactgaatgcagtggttgacttgcaggacagaaatactgaactgtcatatcagcttttgcttgattctctgggagacagaaccagatacttcagcatgtggaatcaggctgtggacagttacgatcccgatgttcgcattattgaaaatcatggcatcgaggatgaactgcctaattactgttttcctctgaatggcataggaccagggcacacatatcaaggcattaaagttaaaaccgatgacactaatggatgggaaaaagatgctaatgttgctccagctaatgaaataaccataggcaacaacctggctatggaaattaatatccaagctaacctttggagaagttttctgtactctaatgtggctttgtaccttccagatgtttacaagtacacgccacctaacattactttgcccactaacaccaacacctatgagtacatgaacgggcgagtggtatccccatccctggttgattcatacatcaacattggcgccaggtggtctcttgacccaatggacaatgtgaatccattcaaccaccaccgcaatgctggtctgcgctacaggtccatgcttctgggaaatggtcgttatgtgcctttccacatacaagtgcctcagaaattctttgctgtcaagaacctacttcttctacctggctcctacacctacgagtggaacttccgaaaggatgtgaacatggtcctgcaaagttcccttggaaatgacctcagaacggatggtgctaccataagtttcaccagcatcaatctctatgccaccttcttccccatggctcacaacacagcttccacccttgaagccatgctgcgcaacgataccaatgatcagtcatttaacgactacctctctgcagctaacatgctttaccccattcctgccaatgcaaccaacattccaatttccatcccatctcgcaactgggcagccttcaggggctggtccttcaccagactcaaaaccaaggagactccatctcttggatcagggttcgatccctacttcgtatattctggatctattccctacctggatggcaccttttaccttaaccacactttcaagaaggtctccatcatgtttgactcctcagtcagctggcctggcaatgacaggctgttgagtccaaatgagtttgaaatcaagcgcactgtggacggggaaggatacaacgtggcacaatgcaacatgaccaaagactggttcctggttcagatgcttgccaattacaacattggctaccagggcttttacatccctgagggatacaaggatcgcatgtactcctttttcagaaacttccagcctatgagcaggcaggtggttgatgaggttaattacactgactacaaagccgtcaccttaccataccaacacaacaactctggctttgtagggtaccttgcacctactatgagacaaggggaaccttacccagccaattatccatacccgctcatcggaactactgccgttaagagtgtcacccagaaaaagttcctgtgcgacaggaccatgtggcgcattcccttctccagcaacttcatgtccatgggggcccttaccgacctgggacagaacatgctctatgccaactcagcccatgcgctggacatgacttttgaggtggatcccatggatgagcccaccctgctttatcttcttttcgaagtcttcgacgtggtcagagtgcaccagccacaccgcggcgtcatcgaggccgtctacctgcgcacaccgttctcggccggcaacgccaccacataa

SEQ ID NO: 12 - protein, 319 aa, Human mastadenovirus B
MAKRARLSTSFNPVYPYEDESSSQHPFINPGFISPDGFTQSPNGVLSLKCVNPLTTASGSLQLKVGSGLTVDTTDGSLEENIKVNTPLTKSNHSINLPIGNGLQIEQNKLCSKLGNGLTFDSSNSIALKNNTLWTGPKPEANCIIEYGKQNPDSKLTLILVKNGGIVNGYVTLMGASDYVNTLFKNKNVSINVELYFDATGHILPDSSSLKTDLELKYKQTADFSARGFMPSTTAYPFVLPNAGTHNENYIFGQCYYKASDGALFPLEVTVMLNKRLPDSRTSYVMTFLWSLNAGLAPETTQATLITSPFTFSYIREDD

SEQ ID NO: 13 - protein, 90 aa, Human mastadenovirus B
NGVLSLKCVNPLTTASGSLQLKVGSGLTVDTTDGSLEENIKVNTPLTKSNHSINLPIGNGLQIEQNKLCSKLGNGLTFDSSNSIALKNNT

SEQ ID NO: 14 - protein, 186 aa, Human mastadenovirus B
WTGPKPEANCIIEYGKQNPDSKLTLILVKNGGIVNGYVTLMGASDYVNTLFKNKNVSINVELYFDATGHILPDSSSLKTDLELKYKQTADFSARGFMPSTTAYPFVLPNAGTHNENYIFGQCYYKASDGALFPLEVTVMLNKRLPDSRTSYVMTFLWSLNAGLAPETTQATLITSPFTFSYIREDD

SEQ ID NO: 15 - protein, 544 aa, Human mastadenovirus B
MRRRAVLGGAVVYPEGPPPSYESVMQQQAAMIQPPLEAPFVPPRYLAPTEGRNSIRYSELSPLYDTTKLYLVDNKSADIASLNYQNDHSNFLTTVVQNNDFTPTEASTQTINFDERSRWGGQLKTIMHTNMPNVNEYMFSNKFKARVMVSRKAPEGVTVNDTYDHKEDILKYEWFEFILPEGNFSATMTIDLMNNAIIDNYLEIGRQNGVLESDIGVKFDTRNFRLGWDPETKLIMPGVYTYEAFHPDIVLLPGCGVDFTESRLSNLLGIRKRHPFQEGFKIMYEDLEGGNIPALLDVTAYEESKKDTTTETTTLAVAEETSEDDDITRGDTYITEKQKREAAAAEVKKELKIQPLEKDSKSRSYNVLEDKINTAYRSWYLSYNYGNPEKGIRSWTLLTTSDVTCGAEQVYWSLPDMMQDPVTFRSTRQVNNYPVVGAELMPVFSKSFYNEQAVYSQQLRQATSLTHVFNRFPENQILIRPPAPTITTVSENVPALTDHGTLPLRSSIRGVQRVTVTDARRRTCPYVYKALGIVAPRVLSSRTF

SEQ ID NO: 16 - protein, 944 aa, Human mastadenovirus B
MATPSMMPQWAYMHIAGQDASEYLSPGLVQFARATDTYFSMGNKFRNPTVAPTHDVTTDRSQRLMLRFVPVDREDNTYSYKVRYTLAVGDNRVLDMASTFFDIRGVLDRGPSFKPYSGTAYNSLAPKGAPNTSQWIVTTNGDNAVTTTTNTFGIASMKGDNITKEGLQIGKDITTTEGEEKPIYADKTYQPEPQVGEESWTDTDGTNEKFGGRALKPATNMKPCYGSFARPTNIKGGQAKNRKVKPTTEGGVETEEPDIDMEFFDGRDAVAGALAPEIVLYTENVNLETPDSHVVYKPETSNNSHANLGQQAMPNRPNYIGFRDNFVGLMYYNSTGNMGVLAGQASQLNAVVDLQDRNTELSYQLLLDSLGDRTRYFSMWNQAVDSYDPDVRIIENHGIEDELPNYCFPLNGIGPGHTYQGIKVKTDDTNGWEKDANVAPANEITIGNNLAMEINIQANLWRSFLYSNVALYLPDVYKYTPPNITLPTNTNTYEYMNGRVVSPSLVDSYINIGARWSLDPMDNVNPFNHHRNAGLRYRSMLLGNGRYVPFHIQVPQKFFAVKNLLLLPGSYTYEWNFRKDVNMVLQSSLGNDLRTDGATISFTSINLYATFFPMAHNTASTLEAMLRNDTNDQSFNDYLSAANMLYPIPANATNIPISIPSRNWAAFRGWSFTRLKTKETPSLGSGFDPYFVYSGSIPYLDGTFYLNHTFKKVSIMFDSSVSWPGNDRLLSPNEFEIKRTVDGEGYNVAQCNMTKDWFLVQMLANYNIGYQGFYIPEGYKDRMYSFFRNFQPMSRQVVDEVNYTDYKAVTLPYQHNNSGFVGYLAPTMRQGEPYPANYPYPLIGTTAVKSVTQKKFLCDRTMWRIPFSSNFMSMGALTDLGQNMLYANSAHALDMTFEVDPMDEPTLLYLLFEVFDVVRVHQPHRGVIEAVYLRTPFSAGNATT

SEQ ID NO: 17 - DNA, 136 bp, Unknown
  Description of Unknown: Human adenovirus 7 sequence
ctctctatttaatataccttatagatggaatggtgccaatatgtaaatgaggtaatttaaaaaagtgcgcgctgtgtggtgattggctgtggggttaacggctaaaatgggcggggcggccgtgggaaaatgacgt

SEQ ID NO: 18 - DNA, 136 bp, Unknown
  Description of Unknown: Human adenovirus 7 sequence
acgtcattttcccacggccgccccgcccattttagccgttaaccccacagccaatcaccacacagcgcgcacttttttaaattacctcatttacatattggcaccattccatctataaggtatattatatagagag

SEQ ID NO: 19 - DNA, 343 bp, Unknown
  Description of Unknown: Human adenovirus 7 sequence
gacttatgtgggaggagctatgttgcaagttattgcggtaaatgtgacgtaaaacgaggtgtggtttgaacacggaagtagacagttttcccacgcttactgacaggatatgaggtagttttgggcggatgcaagtaaaaattctccattttcgcgcgaaaactgaatgaggaagtgaatttctgagtcatttcgcggttatgacagggtggagtatttgccgagggccgagtagactttgaccgtttacgtggaggtttcgattaccgtgtttttcacctaaatttccgcgtacggtgtcaaagtcctgtgtttttacgtaggtgtcagctgatcgctaggg

SEQ ID NO: 20 - DNA, 3440 bp, Unknown
  Description of Unknown: Human adenovirus 7 sequence
tatttaaacctgacgagttccgtcaagaggccactcttgagtgccagcgagaagagttttctccttcgcgccgcaagtcagttctgcgctttgaaaatgagacacctgcgtttcctgccacaggagattatcttcagtgagaccgggatcgaaatactggagtttgtggtaaataccctaatgggagacgacccggaaccgccagtgcagcctttcgatccacctacgctgcacgatctgtatgatttagaggtagacgggcctcaggatcccaatgaggaagctgtgaatgggttttttactgattctatgctgctagctgccgatgaaggattggacataaaccctcctcctgagacccttgttaccccaggggtggttgtggaaagcggcagaggtgggaaaaaattgcctgatctgggagcagctgaaatggacttgcgttgttatgaagagggttttcctccgagtgatgatgaagatggggaaactgagcagtccatccataccgcagtgaatgagggagtaaaagctgccagcgatgtttttaagttggactgtccggagctgcctggacatggctgtaagtcttgtgaatttcacaggaataacactggaatgaaagaactattgtgctcgctttgctatatgagaatgcactgccactttatttacagtaagtgtatttaagtgaaatttaaaggaatagtgtagctgtttaataactgttgaatggtagatttatgttttttacttgtgattttttgtaggtcctgtgtctgatgatgagtcaccttctcctgattcaactacctcacctcctgaaattcaggcgcccgcacctgcaaacgtatgcaagcccattcctgtaaagcctaagcctgggaaacgccctgctgtggataagcttgaggacttgttggagggtggggatggacctttggaccttagtacccggaaactgccaaggcaataagtgccctgcagctgtgtttatttaatgtgacgtcatgtaataaaattatgtcagctgctgagtgttttattacttcttgggtggggacttggatatataagtaggagcagatctgtgtggttagctcacagcaacctgctgccatccatggaggtttgggctatcttggaagacctcagacagactaggctactgctagaaaacgcctcggacggagtctctggcctttggagattctggttcggtggtgatctagctaggctagtgtttaggataaaacaggactacagcgtagaatttgaaaagttattggacgacagtccaggactttttgaagctcttaacttgggtcatcaggctcattttaaggagaaggttttatcagttttagatttttctactcctggtagaactgctgctgctgtagcttttcttacttttatattggataaatggatccgccaaactcacttcagcaagggatacgttttggatttcatagcagcagctttgtggagaacatggaaggctcgcaggatgaggacaatcttagattactggccagtgcagcctctaggagtagcagggatactgagacacccaccgaccatgccagcggttctgcaggaggagcagcaggaggacaatccgagagccggcctggaccctccggtggaggagtagctgacctgtttcctgaactgcgacgggtgcttactaggtctacgaccagtggacagaacagaggcattaagagggagaggaatcctagtgggaataattcaagaaccgagttggctttaagtttaatgagccgcaggcgtcctgaaactgtttggtggcatgaggttcagagcgaaggcagggatgaagtttcaatattgcaggagaaatattcactagaacaacttaagacctgttggttggaacctgaggatgattgggaggtggccattaggaattatgctaagatatctctgaggcctgataaacaatatagaattactaagaagattaatattagaaatgcatgctacatatcagggaatggggcagaggttataatagatacacaagataaagcagcttttagatgttgtatgatgggtatgtggccaggggttgtcggcatggaagcagtaacacttatgaatattaggtttagaggggatgggtataatggcattgtatttatggctaacactaagctgattctacatggttgtagcttttttgggtttaataatacgtgtgtagaagcttgggggcaagttagtgtgaggggttgtagtttttatgcatgctggattgcaacatcaggtagggtcaagagtcagttgtctgtgaagaaatgcatgtttgagagatgtaatcttggcatactgaatgaaggtgaagcaaggatccgccactgcgcagctacagaaactggctgcttcattctaataaagggaaatgccagtgtgaagcataatatgatctgtggacattcggatgagaggccttatcagatgctgacctgcgctggtggacattgcaatattcttgctactgtgcatatcgtttcacatgcacgcaagaaatggcctgtatttgaacataatgtgattaccaagtgcaccatgcacataggtggtcgcaggggaatgtttatgccttaccagtgtaacatgaatcatgtgaaggtaatgttggaaccagatgccttttccagagtgagcttaacaggaatctttgatatgaatattcaactatggaagatcctgagatatgatgacactaaaccgagggtgcgcgcatgcgaatgcggaggcaagcatgctagattccagccggtgtgcgtggatgtgactgaagacctgagacccgatcatttggtgcttgcctgcactggagcggagttcggttccagtggtgaagaaactgactaaagtgagtagtgggggcaagatgtggatggggactttcaggttggtaaggtggacagattgggtaaattttgttaatttctgtcttgcagctgccatgagtggaagcgcttcttttgaggggggagtatttagcccttatctgacgggcaggctcccaccatgggcaggagttcgtcagaatgtcatgggatccactgtggatgggagacccgtccagcccgccaattcctcaacgctgacctatgccactttgagttcgtcaccattggatgcagctgcagccgccgccgctactgctgccgccaacactatccttggaatgggctattacggaagcatcgttgccaattccagttcctctaataacccttcaaccctggctgaggacaagctacttgttctgttggctcagctcgaggccttaacccaacgcttaggcgaactgtctaagcaggtggcccagttgcgtgagcaaactgagtctgctgttgctacagcaaagtctaaataaagatctcaaatcaataaataaa

SEQ ID NO: 21 - DNA, 22921 bp, Unknown
  Description of Unknown: Human adenovirus 7 sequence
tttaagagtcagcgcgcagtacttgttgaagagagcctcggcgtcctcgagagtgcgctgaagttggtcttcgctcttgtgatacaaacaacttctggtgagcgagcgcagagatcggttttttactttcagttcctgctcttgcccccgactctgctggaagatggcatagagggttggaaagatccggttcctcagctctctggtctgcgctggctcgttcgctgtgatcctcagtcctcctcctgctgcacttgttgtagattttctaactgctggttttctggtcaccgttgtcgctgctgtctttttctgtcggggttgccgggacttgctgactgcagtaggggctgtggaggtgacggtagtaatgcaagatattgcgggggaagttcacaccgtggtggaagagcaggtatcgccgggtgaaggatatgttgcccccgcattcatgcaagcaggagatgatagcgtttttatgtccacgccaggacttgtatccctgtcgctccttcttaccggtcttggaagcggtggtcgggtttgggaatcgcccggtctcgtcccatctactgttgggccgccgctggaccccccgacccggagcggagatggtagccgtgctgctgtctggggacttgcttgtctccgccgccgatgacaactgtttggcggcggttgcttcttccacctcctctgcctcctcgtcttcctcctccaaactgtcttcctccaggctgtccacctcctctgcctggctgtcccaatcttccatctcctcctctgcctgactgtcccagtcttcctccatatcctctgggggcgtcagctgcaccttcagcttcttgcttcctcggcgatgggacatcctgggggaaccttgtgttgagctcctcaccggtctgggggtcaaggtagaccccgcttccctttttcagtagaaattcttggcgggatttttggatggcttgcaattgggccagaattgctccctgggtgatgacgcaggctgagagctcgactttgggaggatgtgactggtcctcatagaacctgatctcataggggtggtaatcctcgggatgaaacttgcgcaggtaggcggaggtccacagccccggtgtcagtttcagactctgccccggagaagacccctcgccttcactgctgggaccctgcaactcgaaggtgccgatgatctgggtctcgctcagcaactgggggttgcaggcaagggagcggtggggtgtgcaaagattgcagcggcagtggcattccagcagaccgtctccgctcacatcctctataacatccgagtggtaggagaggtagttggccaggcggaacaggtagcagtggctccatagcggcggtgggcactcgcggtaggtgagaggcacaaagtcggagggcagcgcacagcaggtggcaggcaggataccggagcgttccaggatgaaagagcgaaagttgttaagcatgctctggctcataaagtctggcaggccgtttcgcagagtaaccctgagacgctcggggaagatgatgtctgccaggtccgaggcgacggtgcgctcatcaaaacctgtccacagggctttgagggatctctgcaagagcttgtccagctcttttaggttctgctcttccaaacactgttgccacacacccatgccagtctgccaggtatggcagaggtagaggtagacacagtctcggatgtagtcacggcgggcctcccctttaagggtggtgtgcaggacgctctgccctagccggttctcatgcaaaatgcccatgtaagaaaccaggttggtaagctccacgttggagatcttgcatgcctgccgcacgaagccatgtctaaaggtgtagtgcaggttctcctctagcttgcgcagggtctcggggtcggtgaaaaagcggcgcaaacactccagctccacagttactagcactacagccatcataagcttgcgcctctcttccaaatctcggggggagttggtacccagccagcgagatagctgctcgtcactgactaccggcttgccctcgtccgaggcgtctggatcctgcatgttctggttttctgaaagtggacctgctcgtttgatgagcagatggtccataacagcgctcataactttggggggcaggttaacagcggggtaggcaaaatgggtgaccacgatactgcgcttgagcactgcaagccgggcattgtcaccctccagttccactaaagcgctgtgatgttcatccatgccattctctccctgttgcagagcatttgcggcccgagtctcatcacttcccagaccctcaaagatttttggaacctcttccaaggaagctatatcaggtaagcgagctcccggacccaagttgagaagggcatcggcgcgggtgcggttggcgcggcaggagactggaatcttttggttcttaaaaaagatgtggtaggtggccagcacttcggggacagtaaaagctggatagaagttcagtcgagggttggcctcgcaggtgccgtttggctgccgcttggggggtatgtgaggcgaaaagaggttcagctcgtaggcgcggctaagctcttccacactgatgggcacttcggtgaggtcgagtagtgcgtctttaactatgttcgactgccttgctagatgtttgaggagcacgtcttcccccccaagcccggtgaggtagtcggcaacttgatccccgatgccagcctcctggtgatcgccatctgcttgatgctctgggcggtcgtcatcctctctgtctataaaacgtttcagctcctcctcgtgctccgccggtgtcacatagcccgggtcctgctcgacatctgcctcaatctcttccgctttcacattatcctgcgcctgcatctcctgggctgcgtcgacctcctcctcctcatcatcgagggtagaggtggtggtagctggactgggtggtggggtggttaagctctcctcctcgtcgctgctgggggcgaggtgtgatggcgcttgcagcgatgttggcagtgatggctgagtttccatgtctgttgtttctctgcctaggagaacacaatggccagccgcggaggaaatcagtcaagcgaccgccaacgggagcacacccccgaacgcggaatgggctctgccagccatccgcttccaaggccagaccgcagcccatctcagtcgcctccacctctgcccccgaagaggaacacctaccgtcgcgtggggtccgattcttctatcgagagccaggtggtactggtaagcgaaacttcgcggtcatccctgtctccggaacggagcaacagtcctcccccgatccctcccaagaagaagcccagaaagaccaagcatgtccctctgcaagacatcggccacgacagcgaagaagaaagagaacaggctcagttggtggccgtgggcttcagctaccccccggtgcgcatcattgagaaggatggcaagagaagtgttgagaagatcgacaagaatgaccctatagctaaaggagctacttctattgctgttaggaatcctttgagcttgcccctggtatctgcctgggagaagggcatggaagtgatggctgtgctaatggagaggtacaggctggataatgacctgagaacctctttcaagctgatgccagagcagcacgagcagtacaagcgtatctgccaccagtatgtgaacgaggagcaccgtggcatcccgctgacatttagtagcatgaagaccctgacagcgatgatgggaagattcatgcagggattggtacattcttattctgagatcgcccacaatagttgggagtgcaccgggtgcgctctgtgggctcatggatgcaccgattatgaaggcaaggtgaaatgcctgcatggcactatcatgattcagaaggaccacattatcgagatggatgtggcgagcgagaacggacagcgcgctatgaaggagaacccagacagagccaagatcacccagaaccgctggggcagaaatgtggtccagttggccaacaacgatgcccgctgctgtgtaaatgatgccaactgtgctactaatcaattttccagcaagtcctgtgggatgttctataccgagggaagtaaggctcaggaagctttcaagcagtacgaagccttcatgaaggccgtgtacccagggataacccccgaccaagccaggatgatgctgatccccattcattgcgattgcaaccacaagccaggctgcgctcccgtgatgggcaggcagacctgtaagatgaccccctttgggatggccaatgctgaagacttggatgtgactaccatcagtgacccgaccgtgctggcaagcgtgagacacccagccttgatggtgttccagtgttgcaacccagtgtaccgcaactcccgtgtccagaatgccggtcccaactgtgatttcaagatctctgctcctgacctacttggcgccctgcagctgaccagaaagttgtggcaagacacctttcccgagattccagttcccaagttggtgatccccgagttcaagtggcagaacaggttacagttccgcaacgtatccctgcccgcgggtcactttgactcccgccagaacccatttgatttctgagtgaataatgaaaacgaatgagtaaaaaacgagagccttagtgcatgtaaaaataaagtgctttttattgaacacggttttacatgacttattgcatatccatacggtcaaacgcggtggccctttcgatgcgtgcgcggtgagaacgaaagtaagatgagtgggtgtttaggaagcgatatagcgcctcctggttgcggcgcagggtgggctgcacttggggagattggagcatgctgttgggcaccccagtcagcaacttcatggtggggtttccgttcatggggcggtcgggccagtgcacaaaggcatgaaggaacatacagcaaaaaagtccacaggcggctgagcgtgggccctgcacgctctgggtggacttttccagggtgatgcagcggtctttggtagcaagggcactgcggcgcaggagcccctcgtactcaaactggtaaatctgtttgagtcgctcatccgagaacccaaaaggatcaaaaaggtagcaggtgttggagcgcgggttccaaccaaaagccagccagtgctctccccccgtctcgcgtccggcagtgttgactatggcgcaggcgagcttgtcgggggccatgaaccccgggaaacgcttgtcaaaggttcccaggaaatagggtccgcaacccaggtctcggacgatggctttgagctcttgctcgctggagccgtttccggacccgcatgacatggctgcagctgctgcttgcaagaagcaagaggcttcttatgtggtggcgttgccggccgagaacggtgtgcgcaggtagacggcctcgatgacgccgcggtgtggctggtgcactctgaccacgtcgaagacttcgaaaagaagataaagcagggtgggctcatccatgggatccacctcaaaagtcatgtccagcgcatgggccgagttggcatagagcaggttctgtcccaggtccgtaagggctcccatggacatgaagttgctggagaacggtatgcgccacatggtcctgtcgcacaggaactttttttgggtaacacttttaacggcagtagttccgatgagcgggtatggataattggctgggtaaggttccccttgtctcatagtaggcgcaaggtatcctacaaagccagagttgttgtgttgatatggtaaggtgacggctttgtagtcagtgtaattaacctcatcaaccacctgcctgctcataggctggaagtttctgaaaaaggagtacatgcgatccttgtatccctcagggatgtaaaagccctggtagccaatgttgtagttggcaagcatctgaaccaggaaccagtctttggtcatgttgcattgggccacattgtatccttccccatccacagtgcgcttgatttcaaactcatttggagacaacagcctgtcattgccaggccagctgactgaggagtcaaacatgatggagaccttcttgaaagtgtggttaaggtaaaaagtgccatccaggtagggaatagatccagaataaacgaagtagggatcgaaccctgatccaagagatggagtctccttggttttgagtctggtgaaggaccagcccctgaaggctgcccagttgcgagatgggatggaaattggaatgttggttgcattggcagggatggggtaaagcatgttagctgcagagaggtagtcgttgaatgactgatcattggtatcgttgcgcagcatggcttcaagagttgaagcggtgttgtgagccatggggaagaaggtggcatagaggttgatgctggtgaaacttatgttagcaccatctgttctgaggtcatttccaagggaactttgcaggaccatgttcacatcctttctgaagttccactcataggtgtaggagccaggtagaagaagtaggttcttgacagcaaagaatttttgaggcacttgtatgtggaaaggcacataacggccattgcccagaagcatggaccggtagcgtaggccagcattgcggtggtggttaaatggattcacattgtccattgggtcaagagaccacctggcgccaatgttgatgtatgaatcgaccagagatggggaaaccactcgcccgttcatgtactcataggtgttggtgttagcgggcagagtaatgttagttggcgtgtacttgtaaacatctggaaggtacaaagccacattggagtacagaaaacttctccaaagattagcttggatattaatttccatagccagattgttgcctatggctatttcattagctgtagaaactttagtatctttttcccatgcagtgtctctaggtttaatgccttgatatttgttccctggtcctatgccatccagaggaaaacagtaattaggcagttcatcctcgacgccatgattttcaataatacgaacatcgggatcatagctgtccacagcctgattccacatgctgaagtatctgcttctgtctcccagagaatcaagcaaaagctgatatgacagttcagtgtttctgtcctgcaagtcaaccactgcattcagttgtgatgcttggccggccaaaactcccatatttccagtactgttgtagtacataagacctacaaagttatccctgaagccaatgtaattgggtctgttaggcatggcttgttgacccaaatttgcatgagagttaccatcagaagttcctggcttgtataccacatggctgtctggagtttccaaattgacattttccgtgtaaagcacaatttcaggcgaaaaagcgtcagcagcttctctaccatcgaaaaattccatatcaatatctggctcctcagcttcaacatctccttcggttggtgttacttttctgtttttagcttggcccccttttatgtttgtaggtcttgcaaaagacccgtagcatggcttcattttagtagctggtttaagagctctacctccaaatttttcatttgttccatcaatatcagtccatgattcttctccaacttgaggctctggctgatatgttttatcggcataaatgggcttgttgtctgcagtaatgtctttcccaatttctaaaccttccttagtaatattgtctcccttcgtggaagcaatgccaaatgtgtatgtggtggcattgtcttctcccgttgtaactatccactgagatgtgttaggcgcgcccttaggagccagtgaattgtaagctgtgccggaatatggcttgaagctaggacctctatcaagcacccccctaatgtcaaagaatgtgctggccatgtcaagcactctgttgtcgcccacggcgagggtgtaccgcactttgtaagagtatgtattgtcctcccggtcaacgggcacgaagcgcagcatcagtcgctggctacggtcggtggtcacatcgtgggtgggcgccactgtggggtttctaaacttgttccccatactgaagtaggtgtctgttgcacgggcgaactgcaccagacccggactcaggtactccgaagcatcctgtccggcgatgtgcatgtatgcccattggggcatcatcgatggggtggccatcttgaaagcaactcagcctcggcgcgcgacctcttcctttctcctctgctgcggcggcgtggtgatgatacatacacacagacaagcaagttaagcgctactccatatttaattaatagcagcgacggcgctttacactctgcacgcccagacccacgatgctgttcagagtactttgccagtttgctttcgggcgcggtgtgcccccaggacgcggtctggctacggcaacgggctgtacggcggtgggctttctggtagcgacaggtttgggaacaggcgccgcagaagcagggggaggaggcaagtccaaggtggcgggtcgatgtaactcagaaggtttcatcaccccggtagccatgtgagctacgggcctggtagtgggcattccgagctttactgcctcctcgtatgaagggggctcgtctgcgcgcgtcaccagcgtgtgctctagctcgggtcgcggacgcttgtcgccccgcttttccagcggaggaagttcttcctccacttccatttcaccaggggttgcgggcggcgggtccaggcggctgtttatctgtttttgtacagcctggttggccagatccactacgccgttaataccagaggcgatcccatcgaccaccttctgttggaagttttgttccttaagcttatttctcagagcctgccctgtgctgctgttccaagctttgttcccataggtttttacggtcgagccaaaatttttaagcccgctccagatactgctccaattgaaggcgcccccgttcagttggctcgtgccgatgtcgctccaggtgcccatgtacggcctcgtgccgtgtcgcggagccagggatgaaaaattgatgtcttccatctctacaaaaacatagtcacaggaccaggagcgtcagagtccattctattttttatttataagtttttccaatgttagtggcgctgcgaggcctgaaccgccacggaagctatgcctggtatcgccccgatcgctgcggcgatgatgggtataagagctggcaaaaagccaccccctaatcgtctgctgatagcgcgccttcgtctgtggcggcgcatccctcgccccaacatccttctacggcgcgagtttcttcctcggtagccagtaatggggacgcgaaggcggcaagtgagggccatatctgcaaggaggcagcgtcaacagtcattaagtggtgatgcttggatggtagcgcgcgcgcggcagcgtcagaggttcagcgcgaccatcgcggtacactctccgcaccagggcggcgggagtcaatttgctggcagtgttgcggcggcggcgacggcgagtgcgacttgcaggtggtttgcggcggcgagaggtgttgctccggtttcgatagtagcgagtgcctctgtaacccggagtgggaatgatggatgggtgcagagcatagttgggcattagcagacttgctgggccgtactttcgtcgtgatcttcgagtggtgctgggggcggcaacgggcgcgggcatccagggttccgtttgcacctcaattgaggtggttgtgggttttgcaggttcggtctgcacttccatggactcggtgggaatcttgatgtcgaaggtttgtactcccaaacctggcgccacttccttgataggtcttactttgacctcaggctggatatcggcatccactttcattttctccagtacgtcttctagcctctggcgcttgggcaccattagctgcatggtgggatacaggtcctcaccctcgcgctttacgcctctccgcgcaggcacgggcagcacttgctgcagggtgactggtttgaggctgggggtgggatttccatgatccaaaggaatggacaccgcctcctctttgggactggatctagtgcgcttgccataagcaaactcgtcaaggcggtctgccgcctgctcaagaatattgtcatccccgtacacctcatcataggaccgtttaaaagtagtgctggaacgctcgccgggtgtaaaaaccacagtggtcccgggtctgagcacttgacgcactttgcgcccgcgccactgcacgcgccgtcttggggcgaactcgcgcacaaactccaccagcccatcatcgtcatcttcttcctttttgttatttttgacccgcttgattttgcggggctttttttcatccttcaccggtggaccgtagatttcaggcgcgatgacctggagcatctcttccttgtatttgcgcttggacatacttgccgctgggacacaacatcggagactgctcagtatcttctaagtgcgaggggggcgagtgcgcacgggcacgcgctggccggtagtggcatcacgcacccagtacacattgcctcttcgcggttgggccatgttggcaatggccgctgctgccgccgtggccgcgcgcctgcgggacctgccgctgctggcacctgaagccgcgcgtctggccgctctaagcatggctcttcgccccacacgtttggccctccgcagaatagcttttgcagctcgcatggcgggagtagccctgtggcgcctggcgatgcgcctccttcggctcttccggcgagcataggcgcgggcgtctgccaccacactgtcaataactgcatccacagtagatgtaggcgcagtaggagtataattacgagcatcggcgaccacctggtcgatcacatcatcgaccgtggtccgagtgcgggtacgacccttgagtgcgccccagggagcgcggaaatgaccgcgaacgcgcacagggtgctgggtagagcgtttgcgggcgcctccatacatcttggtgggcgcatacagtccccaaccggtattattactgggcgagatgagaatggacattttttttttttagaaagtgcggcttgaaagaacgcgcggcgcgactatgcccagggccttgtaaacgtagggacaggtgcggcgtctggcgtcagtaacggtcacgcgctggactccccggatactgctgcgtaacggcagggtcccgtgatctgtgagagcaggaacgttttcactgacggtggtaattgtgggcgccggcgggcggatgaggatctggttctcagggaagcggttgaagacgtgcgtgagcgaagtggcctgtcggagctgctgagagtacacggcttgctcattgtagaaactctttgagaagacgggcataagctctgcacccaccactgggtagttgttgacttgtcttgtggagcggaacgtgactgggtcttgcatcatgtcagggagcgaccagtaaacctgctctgccccacaggtgacatctgaagtggtgagcagtgtccaagaccttattcctttcttagggttaccgtaattgtaggacaggtaccaactgcggtaggccgtgttgattttgtcttccaagacattgtagcttctactcttgctgtctttttctagaggttggatctttaactcttttttaacttcagcagctgcagcttcacgtttgtgtttttctgttatataggtatctcctctagttatattatcatcttcactagtttcctctgcaacagccagtgtggttgtttcagtagtggtatcctttttgctttcctcataggcagtgacatccaaaagggcaggaatattacccccttcaagatcttcatacatgattttgaaaccctcctggaatggatgtctcttcctgatgccaagcaagttgctaagtcggctttcagtaaagtctaccccgcaaccaggcagcaatacaatgtcaggatggaatgcctcataagtgtagactcctggcataatcaacttagtttcggggtcccacccgagcctgaaatttctagtgtcaaacttaacaccaatgtcactttccagcactccattctgtctgccaatttccaggtagttgtcaatgatggcattgttcatcaggtcgatcgtcatggtggctgaaaagttgccttctggtaaaatgaactcaaaccactcatacttcaagatatcctctttatgatcataggtgtcatttactgtaacaccttcaggagcttttctggacaccatcaccctcgccttgaacttgttgctgaacatgtactcgttcacgttgggcatgttggtgtgcatgatggtcttcagatgaccgccccatcgcgaccgttcgtcaaagttgatggtctgggtgctagcctccgtgggggtaaagtcattgttctgcaccaccgtggtcaggaagttgctgtggtcgttctgatagttcagggaggcgatgtccgccgacttgttgtcaaccagatacaacttggtggtatcgtacaggggcgacagctccgagtaacgaatgctgtttctcccttccgtaggcgccaggtaccgcgggggtacgaagggaacctccagtgggggctgtatcatcgccgcctgttgctgcatcacgctctcgtaagaaggaggaggaccctccggatacaccaccgctccgcctagcacggctcgtctcctcatcgtactagacacagataacaaaaaagaacgaacgcacgctcggtcgccatggccttggtgagttgcatttttattttactttcacttttacaacatgcgcccgaatctgggacgcagatgagcgaacgggttgccccctcctcttccacccaagtccaacacgctgctatcatcggcagagtcctcatcgtcccacacaagacccatctgtctgtcgtggcgctggcgtctacgggtcggtctgcttgtagcccccaatatcctgggctcgtctctgtgatcctgcgcataggtcttccatctactcatcttatccaccagactctctattccattgttggggaagttcttttccctctctggcctcagcaaagagtcattcaagtactcatcctcgcccatcaagcgcgggcgggttattctccccagttcactgctgcgaacgctgtttagtgaaaagggcaagctagggaaaggacttgcagcttcgggcacggtcgcggcagcaccagccgttccggacagcgacacggaagagtgtcttctatcgcccccttccttcttccaaactgtataaccgggaggcggggagaatatgctgctgtccacatcgtcccacaggaacccgtcattggggtcgggcatgtcgtactcgccagtgtagaaaccaggtgggggcagccagtgtgggttcaggatagcattggtgaaataatcagagttcatggcggccgccctgtgcaggtagtccagcagtttgttaatgaaaggcctgttactagcatacatgctgggctccatgtttcgagctgtcatgtccagcgcggcggtaggtgtcgccccctcctgcatcagaaacagtccaacgctctgttgcacgtatctgaggatccgctcctcctcagcggtaagcgcatactgaggagggatcttctgcgaccggttggttagcaagaagttcagggtggcttccaaactgcccgtgtcttcctgacccagggcgcggctcacttgggtgatttcttgataggtctgctcgtccacctggctctgccctatggcctcgcgatacaggttaagcaggtagcccaagtacgagttgcggtcgatgctaccgctgtcagtaaagggggataccagcagcagcagcaggcgggagttgggagtcagcaagctagacacggtcgcgcgatctcctactggggcgtgcactccccacagacccttcaggttcttgaaagcctgagtcaggttcactgtctgcaagccctgtctgctggtctggaagaagtaatctggcccggactggtacacctcgctctggggcacctcagctaccatgagtctcaatgcactcaaaaagtttgtatagtcttgctgaccacggggcacgttggcgggctgggtgctgaggaaagcgtttagcgctaccaacgaccccaagttggcgccgcgctggaaccgctcgcgctgagacacggcctcgcgcacatcggtcaccatcctgtccaggttggtttgcacgttgctgctgttgtaacgggccacgcgctccaagagagcattgtataccagcccggcctcatcgggacggatggccttgttctccaccagcgcgttcacgatagccaggaccttctcgtgggtggggttggagcgggagggcactacggcctccagtatggccgaaaggcggttggcctggggttgctgtctaaaggcttcggggttgcgggtcgtcagcgccattatgcgttgcatggcctgggtccaatcgtccgaagagttaatgccggacggctggctctgcagcgccgcccgcattgcggggtccggtgcctgctgctgttccatctagcaaaaatacgggtcgcgccatcagtcttccaagtactcgccctcctcgtcctcgacttcatccacctcttctatgtaaggaagctcacaccctgcagcctccatggccctgcgactgggttgccattgcaagtccgctcccatgtcaaagtagttctccccatcagtcccggcccccgttagagctctttgcaagctgtgcataagttctctgtcgctcagctcgcgcctcctgctggcgctcaccgcgcggtgcatcctgtcattgcgatacacccccagatcgtcgctcagagtcagcaccttcagagtcatgcgcatgtaaaacccatctatctttacctccttatctatgggtacgtagggggtcttgtagatcttgcgagcgtagtatttgcccaggctcaagaccgagtagttgatagctgccactttctcagccaaacccaggctacgttcctgcactataatactttgcaggatgttgatcagatcatacagccatctcccatcaggctcggtgatgttcaacaacgcctccctgaatgcctcgttgtccctgctatgttgaaccaccagaaacagctgagctgtcagtggtttgctagtggggttctgggtgatagcctccatcaggtcccacagatgcatcagacccagggtcacttcctcgcgggcgatcagggtgcgcacatggttgttaaaagatttttggaagttgcgctcctccttcacggtctgctcgtaggctgagactaggttggccgcggccacatgtgccctagctgggctgatccctgtcacttcatcgacctcaaaatcctcgtcttgcagcacccgtcttcgatccagaccgtggcgcagctcgcgacccgcgttaaatcgagatgctcgcatctcctctggctcctcaccgctcctgtccctgaacaggttctgctggggcacgtacgcctcgcgagagtcctttttcagttgcacccgcgggtgccgctcgggcgatggtgcgcccaggcgcgccagtccctcgccctcttccaattccagatcataggcgggctgtcccgcgccgctgacggctgcagccgcagtagttacaggagcaggaagagccttttgtggctgttgttgtagctgctgctgagaagggggctgttgctgggggcgcatctgtcgcagcacgggatgcatctgggcaacaaaaaacaaaaaaaaaaaagagggctcgctcccgtaaactggagaagtcggctgggcgggtgccgctcgggcgatggtgcgcccaggcgcgccagtccctcgccctcttccaattccagatcataggcgggctgtcccgcgccgctgacggctgcagccgcagtagttacaggagcaggaagagccttttgtggctgttgttgtagctgctgctgagaagggggctgttgctgggggcgcatctgtcgcagcacgggatgcatctgggcaacaaaaaacaaaaaaaaaaaagagggctcgctcccgtaaactggagaagtcggctggcggggtcttagaaacgtcgcggaaaccggccgatccggcgcgctaagactcgaaccggggcacaccgcaacgcaaccctggcgattaattctccagactacgggcgcgagccactcccagccccgagaactgagtgttctaaagcttgacgcagcactggctcccatccaggaaaaagcaaaaaaacgacccgcctccgtatcctggaggttttgtgcaggcctgggtcgagacgggagtgccagtaccacgttagctgcggctccagcctgatccgagattcgaaccggggtacacgcgcagcccaacccgttcgcttagcctccaggccacggagacgagccgctgaccgctttcgtttttgcccgtatgtctagagcatcaacgactgtgcacgtctcacgggccaaaccgtgcctaccatgaactacttcatgccgctgcgcaacatctggaaccgcgtacgcgagttcccgcgggcatccaccaccgcctccggtatcacctggatgtccaggtacatctacggttaccaccgcctcatgctggaagaccttgcccccggagccccggctacagagcgatggcccctgtaccgccagccaccgccacactttctcatcggctaccagtacctggtgcgcacctgcaacgattacatctttgacacccgcgcatactcgcgcctcaagtacaccgagctcgtgcgccctgggcaccagacagtcaactggtcagtcatggccaactgctcctacacaatcaacaccggggcctaccaccgctttgtggactttgacgacttccaagccaccctcacccaggtgcagcaagccatcctcgccgaaagggttgtagcggacctggcacttgtccagcccatgcgcgggttcgggatcactcgcatgcatggcagagcgggcgaagaagaagtgcccgtggaacgactcatgcaagactactataaagatctggccagatgtcaggataatgcttggggaatggcccatcgcctgcgcatccaacaagccggacccaaagacctggtgctcctcgccaccatccgccgtctcaaaactgcctattttaatttcatcaccagcagcatcgtctcatcctcccaagaggaggaaggaaaagaaagagagaaccccgaccgagcgtctagccgcccccgcccgcaagaaacagtgctcagcctaccttgcgattgcgactggttagacgctttcgtcgaaaggttttcagatcccgtggatcttgagacgatcaggtccttgcgcggagtacctacggggcaattgataaaatgcataatcagcgcggtgtccctgcccaacggagagcctcccagtcaccacttcagggagatgcgcggaggcgtcttcactctgagacccagggagaacggtcgtgccgtcaccgagaccatgcgccgccgccgcggagaggtcattgaaagattcatcgaccgtctgcccgtgcgccgccggcgtcgccgcgttccccctcctcctgcagccccacctgaagaggaagagatgttagtggaagaagaagagattgaggaagaaatcccgggggatttcgagcgcgaggtgcgcaccaccattgccgaactcatccgtcttctggaagaggagttgaccgtgtccgcgcgtaactcccagtttttcaactttgccgtggacttctacgaggccatggagcgcttggaagcgctgggcgatgtcagcgagatgccgctgagacgatggatcatgtatttcttcgtcaccgagcacatcgccaccacactcaactaccttttccagcgcctatgcaactatgcggtcttcacccgccacgtagagcttaacctcgcccaggtggttatgcgcgcgagagatcccgtgggggctgtggtctacagccgcgtctggaacgaggcgggcatgaatgcattctctcaactcattgggcgcatctccaacgacctagcggccaccgtcgagagagcgggccgcggagatcttcaagaggaagagatccagcagttcatggccgagatcgcctaccaggataactctggcgacgtgcaagaaatccttaggcaagccgccgtcaacgataccgagattgattctgttgaactctctttcaggttcaagctcacggggccggtagctttcacccagaggcgtcagatccaggatgtcaaccgccgcgtcgtcgcacatgcgagtcttctcagggcgcagtaccagaacctacccgcgcgcggcgccgacgtaccactgccagccatgccgccgggtcccgagccgcccctgccgcccggtgcgcgccctcgacaccgctcctaaacatgcaagaagcaacagagccaccgccgcccaaaaggaaaaacaagggcacggtggtagcgcccaaggggcacggaaccctgcaagccattgacatctccaccaacggacccgtggagatcaagtaccatctgaacctccctcacgccctcgaaaagatcatgcaagtcaatctcctgacactgcctactaacctgactccgcagcgtctcaggaccctggacagctccggcctgcgcgctctcgtcctcgagctccgcccctgccgcgccgaggtctggacttgcctcccgcgagggctcgtcagcatgaccaccatcgagacagaagatggtcatgccgatgcagacaacatagtagagcgccaggtacaaacgccaggcctcaattttccactgaaatttctcgtcaaaggaagtcaggtacaactcattcatgaggtgcatcccgtgaatcgctgcgagtactgcggccgtctgtacaagcacaagcatgaatgctcggcgcgtcgcagggagttctacttccatcacatcaacagccattcctccaactggtggcaggagatccagttcttcccgattggctctcatcctcgcacagaaaggctcttcctcacctacgatgtggaaacctacacctggatggggtcctttggcaagcagctaatccccttcatgctggtcatgaaactctctggagaccagcggctcgtcaacatcgcctatgacctcgccatgaaacttaagtgggatcgctggcggcaggacccccaaaccttctattgcgtcaccccagaaaaaatggcagtcgggcagcattttcgtcaataccgggaccagttacaaacagcactcgcagtggacctctggtcctccttcctcaaagcgaaccctcacgtgcacgaatgggccctcgaacactatgctctcactgaccctacagatctcacttttgaagaactcaagaagctgcctcatgtcaggggcacccctcgattcttagaactgtacatagtggggcacaacatcaatggctttgatgagatcgtcttggccgctcaggttatcaataaccgagcagaggtccctcagcctttcagaatcacccgaaatttcatgcccagggccggcaagatcctcttcaatgatgttactttcgctttgcccaaccccgcctacaagaagcgggtggacttccaactctgggaacagggggcctgtgatgacatggacttcaagtatcaattcctcaaagtcatggtcagggacacttttgccctcactcatacctcgctgcgcaatgcagcccaagcatactctctcccagtggagaagggatgctgtccctacaaggcagtcaatcagttctacatgttgggctcttaccgtgcagaaaaagacgggtttcccctcgaagagtactggaaggatcgcgaagaataccttctcaaccgcgagctgtgggaaaagaaaagccaaccgcgttatgacatcatccaggaaactctcgactactgtgccctggatgtactcgtcaccgccgagctggtagccaagctgcaagagtcatatgcccacttcataagggactctgtaggcctacctcatgcccattttaacatattccagagacctactatctcttcaaattcccatgccatctttcgccagatcgtttacagggcggaaaaacccaaccgcaccaatctgggcccgggtcttctcgccccctcacatgaactctatgactatgtgcgagcaagcatcagaggggggcgctgttatcccacttacatcggcatcctcgaagagcccctctatgtatacgatatctgtggcatgtatgcctccgcgctcacccaccccatgccctggggcacccctcttaacccctatgagcgcgcgctggcagttcgagaatggcagatgaccttggatgatcccaccaccatcagctattttgacaaagatttgctaccgggaatatttaccatagatgcggacccccctgatgagctcatgctagaccccctcccccctttctgttcaagaaaaggaggtcgactctgctggaccaatgagcccctccgaggcgaggtggccaccagtgtggatctgataaccctgcacaataggggatggcgagtcagaatagttccggatgaactgacaaccatcttccctgaatggaaatgtgtggcgcgcgagtacgtccagcttaacatcgccgccaaggagcgcgcggacaaggaaaagaaccaaaccatgcgctccatcgccaagcttctatccaatgccctctatggatcatttgctaccaagctggacaacaagaagattgtgttttctgaccagatggacgagagtcttatgaaaggcatctctgctggtactgtcaatatcaaatcctcctcgttcctagaaactgacaacctgagtgcagaggtcatgcccgccttcgagagggaatacctaccccaacagctggcgctcctggacagcgatccggaagacagtgaggacgaacagaggcccgcccccttttatacccccccggcggggacccctggtcacgtggcctacacttacaagccaatcacattcttggatgtggaggagggggacatgtgtttacataccgtagagaaggtggaccccctggttgacaacgaccgctacccctcccacgtggcctcctttgtgctggcctggacacgcgcttttgtatcagagtgggctgggttcctctacgaagaggaccgaggcactccgctcgaggacaggcccataaagtcggtctacggggacacggacagcctctttgtcacccagcggggacacgacctcatggaaaccaaaggtaagaaacgcatcaaaaaacatggcggaaaacttgtttttgaccccgatgagccggatctgacctggctcgtggagtgcgaaaccgtctgcgcctcctgcggtgcggatgcatactcccccgaatccattttcctcgcgcccaagctgtatgccctcaaatgtatctactgccccgcctgccataaaacttccaaaggtaagctccgtgccaaaggccacgcggccgaggcgctcaactacgaactcatggtaaactgctacctggccgacatgcagggcgccgatcggcagcggttctcgaccagcaggatgagtctgaagcgcaccctcgcaagcgcccaaccaggcgcgcacccattcaccgtgacggaaacaaccctgactcggacgctgcgaccatggaaggatcggaccctggcagcgctggacgcccatcgtctgattccctactccaggagccgtcccaacccgcgaaacgaggaggtctgctggatcgagatgccatagagcacatcaccgagctctgggaccggctcgagctcttgcaacagactctttccaaaatgcccatggctgacgggctgaagccgctgaaaaacttctcctcgctccaggagcttctatcccttgggggagagcgcctcctaacggacttggtgcgggaaaatatccatgtaagggaaatgatgaacgaagtggcccccctactccgggaggacggcagctgtcgctccctaaactaccatctgcaacccgtaattggggtcatttacggtcccactgggtgcggcaagtctcagctgcttaggaatttgctctcatcccagttaatcaccccggctccagaaacggtattttttatagccccgcaggtggacatgatccccccctctgaactgaaagcctgggaaatgcaaatatgtgaggggaactatgctcccgggccagagggaactttcatcccccaatctggcaccctccgcccaaagtttattaaaatggcttatgatgacctgactcaggagcataactatgatgtttcagacccccggaacgtgttcgcccgtgccgctgcccacggccccatcgctatcattatggatgagtgcatggagaatctggggggtcacaaaggcgtctccaaattttttcatgcttttccctctaagctgcatgataaatttcccaagtgcaccggatacactgtcttagtggtcctgcacaatatgaacccgagacgggatctaggcggcaacattgccaacctcaagatccagtccaaaatgcatataatttcaccccggatgtacccgtcccagctcaatagatttgtaaacacctacactaagggcctccccgttgcaattagtctgctcctaaaagatattgtgcaacaccatgcactccgaccttgctatgactgggtgatttataacactaccccggagcaagaggctcttcaatggagctatctccacccccgagacggactaatgcctatgtatctaaacattcaatcccacctttacagggtactggaaaagatccaccgagttctcaatgatcgagaccgatggtccagggcataccgcgcgcgaaaaatcaaataaaca

SEQ ID NO: 22 - DNA, 4038 bp, Unknown
  Description of Unknown: Human adenovirus 7 sequence
tataaaacgcctggtgatcagaggccgaggtatccagctcaacgacgagtcggttagctcttcgcttggtctgcgaccagacggagtcttccagatcgccggctgtgggagatcttccttcacccctcgtcaggctgtactgactttggagagttcgtcctcgcagccccgctcgggcggcatcggaactctccagttcgtggaggagtttactccctctgtctacttcaaccccttctccggctctcctggccagtacccagacgagttcataccgaacttcgacgcaatcagcgagtcagtggatggctatgattgatgtctaatggtggcgcggctgagctagctcgactgcgacacctagaccactgccgccgctttcgctgcttcgcccgggaactcaccgagttcatctacttcgaactccccgaggagcaccctcagggtccggcccacggagtgcggattaccatcgaagggggaatagactctcgcctgcatcgaatcttctcccagcgacccgtgctgattgagcgcgaccagggaaatacaaccatctccatttactgcatctgtaaccaccccggattgcatgaaagcctttgctgtcttgtttgtgctgagtttaataaaaactgagttaagaccctcctacggactaccgcttcttcaatcaggactttacaacaccaaccagatcttccagaagacccagacccttcctcctctgatccaggactctaactctaccttaccagcaccatccactactaaccttcccgaaactaacaagcttggatctcatctgcaacaccgcctttcacgaagccttctttctgccaatactaccactcccaaaaccggaggtgagctccgcggtctccctactgacgacccctgggtggtagcgggttttgtaacgttaggagtagttgcgggtgggcttgtgctaatcctttgctacctatacataccttgctgtgcatatttagtcatattgcgctgttggtttaaaaaatgggggccatattagtcgtgcttgctttactttcgcttttgggtctgggctctgctaatctcaatcctcttgatcacgatccatgtctagacttcgacccagaaaactgcacacttacttttgcacccgacacaagccgtctctgtggagttcttattaagtgcggatgggactgcaggtccgttgaaattacacataataataaaacatggaacaataccttatccaccacatgggagccaggagttcccgagtggtatactgtctctgtccgaggtcctgacggttccatccgcattagtaacaacacttttattttttctgaaatgtgcgatctggccatgttcatgagcagacagtatgacctatggcctcccagcaaagagaacattgtggcattttccattgcttattgcttggtaacatgcatcatcactgctatcatttgtgtgtgcatacacttgcttatagttattcgccctagacaaagcaataaggaaaaagagaaaatgccttaacctttttactcataccttttctttacagcatggcttttgttacagctctaattattgccaacattgtcactgtcgctcacgggcaaacaattatccatattaccttaggacataatcacacccttgtagggcccccaattacttcagaggttatttggaccaaacttggaagtgttgattattttgatataatttgcaacaaaactaaaccaatatttgtaatctgtaacagacaaaatctcacgttaattaatgttagcaaaatttataacggttactattatggttatgacagatccagtagtcaatataaaaattacttagttcgcataactcagcccaaattaacagtgcccactatgacaataattaaaatggctaataaagcattagaaaattttacatcaccaacaacgcccaatgaaaaaaacattccaaattcaatgattgcaattattgcggcggtggcattgggaatggcactaataataatatgcatgttcctatatgcttgttgctataaaaagtttcaacataaacaggatccactactaaattttaacatttaattttttatacagatgttttccactacaatttttatcattactagccttgcagctgtaacttatggccgttcacacctaactctacctgttggctcaacatgtacactacaaggaccccaacaaggctatgtcacttggtggagaatatatgataatggagggttcgctagaccatgtgatcagcctggtacaaaattttcatgcaacggaagagacttgaccataattaacataacatcaaatgagcaaggcttctattatggaaccaactataaagatagtttagattacaacattattgtagtgccagccaccacttctgctccccgcaaaaccactttctctagcagcagtgccaaagcaagcacaattcctaaaacagcttctgctatgttaaagcttcaaaaaatcgctttaaataattccacagccgctcccaatacaattcctaaatcaacaattggcatcattactgccgtggtagtgggattaattattatatttttgtgcataatgtactatgcctgctgctatagaaaacatgaacaaaaaggtgatgcattactaaattttgacatttaattttttatagaattatgatattgtttcaatcaaataccactaacactatcaatgtgcagactactttaaatcatgacatggaaaaccacactacctcctatgcatacacaaacattcagcctaaatacgctatgcaatagaaattctaaaagacgtcccatctattctcctatgattagtcgtccccatatggctttgaatgaaatctaagatcttttttttttttctcttacagtatggtgaacaccaatcatgatccctagaaatttcttcttcaccatactcatctgtgctttcaatgtctgtgctactttcacagcagtagccactgcaagcccagactgtataggaccatttgcttcctatgcactttttgccttcgttacttgcatctgcgtgtgtagcatagtctgcctggttattaattttttccaactggtagactggatctttgtacgaattgcctacctacgtcaccatcccgaataccgcaatcaaaatgttgcggcacttcttaggcttatttaaaaccatgcaggctatgctaccagtcattttaattctgctactaccctgcattgccctagcttccaccgccactcgcgctacacctgaacaacttagaaaatgcaaatttcaacaaccatggtcatttcttgattgctaccatgaaaaatctgatttccccacatactggatagtgattgttggaataattaacatactttcatgtacctttttctcaatcacaatataccccacatttaattttgggtggaattctcccaatgcactgggttacccacaagaaccagatgaacatatcccactacaacacatacaacaaccactagcactggtagagtatgaaaatgagccacaaccttcactacctcctgccattagttacttcaacctaaccggcggagatgactgaaatactcaccacctccaattccgccgaggatctgcttgatatggacggccgcgtctcagaacagcgactcgcccaactacgcatccgccagcagcaggaacgcgtgaccaaagagctcagagatgtcatccaaattcaccaatgcaaaaaaggcatattttgcttggtaaaacaagccaagatatcctacgagatcaccgctactgaccatcgcctctcttacgaacttggcccccaacgacaaaaatttacatgcatggtgggaatcacccctatagttatcactcagcaaagtggagatactaaggggtgcattcactgctcttgcgattccatcgagtgcacctacaccctgctaaagaccctatgcggcctaagagacctgctacccatgaattaaaaattaataaaaaa

SEQ ID NO: 23 - DNA, 978 bp, Unknown
  Description of Unknown: Human adenovirus 7 sequence
atgaccaagagagtccggctcagtgattccttcaaccctgtctacccctatgaagatgaaagcacctcccaacacccctttataaacccagggtttatttccccaaatggctttacacaaagcccagacggagttcttactttaaaatgtttaaccccactaacaaccacaggcgggtctctacagttaaaagtgggagggggtcttacaatagatgacaccgacggttttttgaaagaaaacataagtgccaccacaccactcgttaagactggtcactctataggtttgtcgctaggacccggattaggaacaaatgaaaacaaactttgtgccaaattgggagaaggacttacattcaattccaacaacatttgcattaatgacaatattaacaccctatggacaggagttaaccccaccagagccaactgtcaaataatggcctccagtgaatctaatgattgcaaattaattctaacactagttaaaactggagccctcgtcactgcatttgtttatgttataggagtatctaacgattttaatatgctaactacacataaaaatataaatttcactgcagagctgttttttgattctactggtaatttattaactagcctttcatccctaaaaactccacttaatcataaatcagggcaaaacatggctactggtgcccttactaatgctaaaggtttcatgcccagcacaactgcctatcctttcaatgttaattccagagaaaaagaaaactacatttacggaacttgttactacacagctagtgatcacactgcttttcccattgacatatctgtcatgcttaaccaaagagcattaaataatgagacatcatattgtattcgtgtaacttggtcctggaatacaggagttgccccagaagtgcaaacctctgctactaccctagtcacctctccatttaccttttactacattagagaagacgactga

SEQ ID NO: 24 - DNA, 273 bp, Unknown
  Description of Unknown: Human adenovirus 7 sequence
gacggagttcttactttaaaatgtttaaccccactaacaaccacaggcgggtctctacagttaaaagtgggagggggtcttacaatagatgacaccgacggttttttgaaagaaaacataagtgccaccacaccactcgttaagactggtcactctataggtttgtcgctaggacccggattaggaacaaatgaaaacaaactttgtgccaaattgggagaaggacttacattcaattccaacaacatttgcattaatgacaatattaacacc

SEQ ID NO: 25 - DNA, 576 bp, Unknown
  Description of Unknown: Human adenovirus 7 sequence
ctatggacaggagttaaccccaccagagccaactgtcaaataatggcctccagtgaatctaatgattgcaaattaattctaacactagttaaaactggagccctcgtcactgcatttgtttatgttataggagtatctaacgattttaatatgctaactacacataaaaatataaatttcactgcagagctgttttttgattctactggtaatttattaactagcctttcatccctaaaaactccacttaatcataaatcagggcaaaacatggctactggtgcccttactaatgctaaaggtttcatgcccagcacaactgcctatcctttcaatgttaattccagagaaaaagaaaactacatttacggaacttgttactacacagctagtgatcacactgcttttcccattgacatatctgtcatgcttaaccaaagagcattaaataatgagacatcatattgtattcgtgtaacttggtcctggaatacaggagttgccccagaagtgcaaacctctgctactaccctagtcacctctccatttaccttttactacattagagaagacgac

SEQ ID NO: 26 - DNA, 1635 bp, Unknown
  Description of Unknown: Human adenovirus 7 sequence
atgaggagacgagccgtgctaggcggagcggtggtgtatccggagggtcctcctccttcttacgagagcgtgatgcagcaacaggcggcgatgatacagcccccactggaggttcccttcgtacccccgcggtacctggcgcctacggaagggagaaacagcattcgttactcggagctgtcgcccctgtacgataccaccaagttgtatctggttgacaacaagtcggcggacatcgcctccctgaactatcagaacgaccacagcaacttcctgaccacggtggtgcagaacaatgactttacccccacggaggctagcacccagaccatcaactttgacgaacggtcgcgatggggcggtcatctgaagaccatcatgcacaccaacatgcccaacgtgaacgagtacatgttcagcaacaagttcaaggcgagggtgatggtgtccagaaaagctcctgaaggtgttacagtaaatgacacctatgatcataaagaggatatcttgaagtatgagtggtttgagttcattttaccagaaggcaacttttcagccaccatgacgatcgacctgatgaacaatgccatcattgacaactacctggaaattggcagacagaatggagtgctggaaagtgacattggtgttaagtttgacactagaaatttcaggctcgggtgggaccccgaaactaagttgattatgccaggagtctacacttatgaggcattccatcctgacattgtattgctgcctggttgcggggtagactttactgaaagccgacttagcaacttgcttggcatcaggaagagacatccattccaggagggtttcaaaatcatgtatgaagatcttgaagggggtaatattcctgcccttttggatgtcactgcctatgaggaaagcaaaaaggataccactactgaaacaaccacactggctgttgcagaggaaactagtgaagatgataatataactagaggagatacctatataacagaaaaacacaaacgtgaagctgcagctgctgaagttaaaaaagagttaaagatccaacctctagaaaaagacagcaagagtagaagctacaatgtcttggaagacaaaatcaacacggcctaccgcagttggtacctgtcctacaattacggtaaccctaagaaaggaataaggtcttggacactgctcaccacttcagatgtcacctgtggggcagagcaggtttactggtcgctccctgacatgatgcaagacccagtcacgttccgctccacaagacaagtcaacaactacccagtggtgggtgcagagcttatgcccgtcttctcaaagagtttctacaatgagcaagccgtgtactctcagcagctccgacaggccacttcgctcacgcacgtcttcaaccgcttccctgagaaccagatcctcatccgcccgccggcgcccacaattaccaccgtcagtgaaaacgttcctgctctcacagatcacgggaccctgccgttacgcagcagtatccggggagtccagcgcgtgaccgttactgacgccagacgccgcacctgtccctacgtttacaaggccctgggcatagtcgcgccgcgcgttctttcaagccgcactttctaa

SEQ ID NO: 27 - DNA, 2805 bp, Unknown
  Description of Unknown: Human adenovirus 7 sequence
atggccaccccatcgatgatgccccaatgggcatacatgcacatcgccggacaggatgcttcggagtacctgagtccgggtctggtgcagttcgcccgtgcaacagacacctacttcagtatggggaacaagtttagaaaccccacagtggcgcccacccacgatgtgaccaccgaccgtagccagcgactgatgctgcgcttcgtgcccgttgaccgggaggacaatacatactcttacaaagtgcggtacaccctcgccgtgggcgacaacagagtgcttgacatggccagcacattctttgacattaggggggtgcttgatagaggtcctagcttcaagccatattccggcacagcttacaattcactggctcctaagggcgcgcctaacacatctcagtggatagttacaacgggagaagacaatgccaccacatacacatttggcattgcttccacgaagggagacaatattactaaggaaggtttagaaattgggaaagacattactgcagacaacaagcccatttatgccgataaaacatatcagccagagcctcaagttggagaagaatcatggactgatattgatggaacaaatgaaaaatttggaggtagagctcttaaaccagctactaaaatgaagccatgctacgggtcttttgcaagacctacaaacataaaagggggccaagctaaaaacagaaaagtaacaccaaccgaaggagatgttgaagctgaggagccagatattgatatggaatttttcgatggtagagaagctgctgacgctttttcgcctgaaattgtgctttacacggaaaatgtcaatttggaaactccagacagccatgtggtatacaagccaggaacttctgatggtaactctcatgcaaatttgggtcaacaagccatgcctaacagacccaattacattggcttcagggataactttgtaggtcttatgtactacaacagtactggaaatatgggagttttggccggccaagcatcacaactgaatgcagtggttgacttgcaggacagaaacactgaactgtcatatcagcttttgcttgattctctgggagacagaagcagatacttcagcatgtggaatcaggctgtggacagctatgatcccgatgttcgtattattgaaaatcatggcgtcgaggatgaactgcctaattactgttttcctctggatggcataggaccagggaacaaatatcaaggcattaaacctagagacactgcatgggaaaaagatactaaagtttctacagctaatgaaatagccataggcaacaatctggctatggaaattaatatccaagctaatctttggagaagttttctgtactccaatgtggctttgtaccttccagatgtttacaagtacacgccaactaacattactctgcccgctaacaccaacacctatgagtacatgaacgggcgagtggtttccccatctctggtcgattcatacatcaacattggcgccaggtggtctcttgacccaatggacaatgtgaatccatttaaccaccaccgcaatgctggcctacgctaccggtccatgcttctgggcaatggccgttatgtgcctttccacatacaagtgcctcaaaaattctttgctgtcaagaacctacttcttctacctggctcctacacctatgagtggaacttcagaaaggatgtgaacatggtcctgcaaagttcccttggaaatgacctcagaacagatggtgctaacataagtttcaccagcatcaacctctatgccaccttcttccccatggctcacaacaccgcttcaactcttgaagccatgctgcgcaacgataccaatgatcagtcattcaacgactacctctctgcagctaacatgctttaccccatccctgccaatgcaaccaacattccaatttccatcccatctcgcaactgggcagccttcaggggctggtccttcaccagactcaaaaccaaggagactccatctcttggatcagggttcgatccctacttcgtttattctggatctattccctacctggatggcactttttaccttaaccacactttcaagaaggtctccatcatgtttgactcctcagtcagctggcctggcaatgacaggctgttgtctccaaatgagtttgaaatcaagcgcactgtggatggggaaggatacaatgtggcccaatgcaacatgaccaaagactggttcctggttcagatgcttgccaactacaacattggctaccagggcttttacatccctgagggatacaaggatcgcatgtactcctttttcagaaacttccagcctatgagcaggcaggtggttgatgaggttaattacactgactacaaagccgtcaccttaccatatcaacacaacaactctggctttgtaggataccttgcgcctactatgagacaaggggaaccttacccagccaattatccatacccgctcatcggaactactgccgttaaaagtgttacccaaaaaaagttcctgtgcgacaggaccatgtggcgcataccgttctccagcaacttcatgtccatgggagcccttacggacctgggacagaacctgctctatgccaactcggcccatgcgctggacatgacttttgaggtggatcccatggatgagcccaccctgctttatcttcttttcgaagtcttcgacgtggtcagagtgcaccagccacaccgcggcgtcatcgaggccgtctacctgcgcacaccgttctcggccggcaacgccaccacataa

SEQ ID NO: 28 - protein, 325 aa, Unknown
  Description of Unknown: Human adenovirus 7 sequence
MTKRVRLSDSFNPVYPYEDESTSQHPFINPGFISPNGFTQSPDGVLTLKCLTPLTTTGGSLQLKVGGGLTIDDTDGFLKENISATTPLVKTGHSIGLSLGPGLGTNENKLCAKLGEGLTFNSNNICINDNINTLWTGVNPTRANCQIMASSESNDCKLILTLVKTGALVTAFVYVIGVSNDFNMLTTHKNINFTAELFFDSTGNLLTSLSSLKTPLNHKSGQNMATGALTNAKGFMPSTTAYPFNVNSREKENYIYGTCYYTASDHTAFPIDISVMLNQRALNNETSYCIRVTWSWNTGVAPEVQTSATTLVTSPFTFYYIREDD

SEQ ID NO: 29 - protein, 91 aa, Unknown
  Description of Unknown: Human adenovirus 7 sequence
DGVLTLKCLTPLTTTGGSLQLKVGGGLTIDDTDGFLKENISATTPLVKTGHSIGLSLGPGLGTNENKLCAKLGEGLTFNSNNICINDNINT

SEQ ID NO: 30 - protein, 192 aa, Unknown
  Description of Unknown: Human adenovirus 7 sequence
LWTGVNPTRANCQIMASSESNDCKLILTLVKTGALVTAFVYVIGVSNDFNMLTTHKNINFTAELFFDSTGNLLTSLSSLKTPLNHKSGQNMATGALTNAKGFMPSTTAYPFNVNSREKENYIYGTCYYTASDHTAFPIDISVMLNQRALNNETSYCIRVTWSWNTGVAPEVQTSATTLVTSPFTFYYIREDD

SEQ ID NO: 31 - protein, 544 aa, Unknown
  Description of Unknown: Human adenovirus 7 sequence
MRRRAVLGGAVVYPEGPPPSYESVMQQQAAMIQPPLEVPFVPPRYLAPTEGRNSIRYSELSPLYDTTKLYLVDNKSADIASLNYQNDHSNFLTTVVQNNDFTPTEASTQTINFDERSRWGGHLKTIMHTNMPNVNEYMFSNKFKARVMVSRKAPEGVTVNDTYDHKEDILKYEWFEFILPEGNFSATMTIDLMNNAIIDNYLEIGRQNGVLESDIGVKFDTRNFRLGWDPETKLIMPGVYTYEAFHPDIVLLPGCGVDFTESRLSNLLGIRKRHPFQEGFKIMYEDLEGGNIPALLDVTAYEESKKDTTTETTTLAVAEETSEDDNITRGDTYITEKHKREAAAAEVKKELKIQPLEKDSKSRSYNVLEDKINTAYRSWYLSYNYGNPKKGIRSWTLLTTSDVTCGAEQVYWSLPDMMQDPVTFRSTRQVNNYPVVGAELMPVFSKSFYNEQAVYSQQLRQATSLTHVFNRFPENQILIRPPAPTITTVSENVPALTDHGTLPLRSSIRGVQRVTVTDARRRTCPYVYKALGIVAPRVLSSRTF

SEQ ID NO: 32 - protein, 934 aa, Unknown
  Description of Unknown: Human adenovirus 7 sequence
MATPSMMPQWAYMHIAGQDASEYLSPGLVQFARATDTYFSMGNKFRNPTVAPTHDVTTDRSQRLMLRFVPVDREDNTYSYKVRYTLAVGDNRVLDMASTFFDIRGVLDRGPSFKPYSGTAYNSLAPKGAPNTSQWIVTTGEDNATTYTFGIASTKGDNITKEGLEIGKDITADNKPIYADKTYQPEPQVGEESWTDIDGTNEKFGGRALKPATKMKPCYGSFARPTNIKGGQAKNRKVTPTEGDVEAEEPDIDMEFFDGREAADAFSPEIVLYTENVNLETPDSHVVYKPGTSDGNSHANLGQQAMPNRPNYIGFRDNFVGLMYYNSTGNMGVLAGQASQLNAVVDLQDRNTELSYQLLLDSLGDRSRYFSMWNQAVDSYDPDVRIIENHGVEDELPNYCFPLDGIGPGNKYQGIKPRDTAWEKDTKVSTANEIAIGNNLAMEINIQANLWRSFLYSNVALYLPDVYKYTPTNITLPANTNTYEYMNGRVVSPSLVDSYINIGARWSLDPMDNVNPFNHHRNAGLRYRSMLLGNGRYVPFHIQVPQKFFAVKNLLLLPGSYTYEWNFRKDVNMVLQSSLGNDLRTDGANISFTSINLYATFFPMAHNTASTLEAMLRNDTNDQSFNDYLSAANMLYPIPANATNIPISIPSRNWAAFRGWSFTRLKTKETPSLGSGFDPYFVYSGSIPYLDGTFYLNHTFKKVSIMFDSSVSWPGNDRLLSPNEFEIKRTVDGEGYNVAQCNMTKDWFLVQMLANYNIGYQGFYIPEGYKDRMYSFFRNFQPMSRQVVDEVNYTDYKAVTLPYQHNNSGFVGYLAPTMRQGEPYPANYPYPLIGTTAVKSVTQKKFLCDRTMWRIPFSSNFMSMGALTDLGQNLLYANSAHALDMTFEVDPMDEPTLLYLLFEVFDVVRVHQPHRGVIEAVYLRTPFSAGNATT

SEQ ID NO: 33 - DNA, 137 bp, Human mastadenovirus B
catcatcaataatataccttatagatggaatggtgccaatatgtaaatgaggtgattttaaaaagtgtggatcgtgtggtgattggctgtggggttaacggctaaaaggggcggtgcgaccgtgggaaaatgacgtt

SEQ ID NO: 34 - DNA, 137 bp, Human mastadenovirus B
aacgtcattttcccacggtcgcaccgccccttttagccgttaaccccacagccaatcaccacacgatccacactttttaaaatcacctcatttacatattggcaccattccatctataaggtatattattgatgatg

SEQ ID NO: 35 - DNA, 342 bp, Human mastadenovirus B
ttgtgggggtggagtttttttgcaagttgtcgcgggaaatgtgacgcataaaaaggcttttttctcacggaactacttagttttcccacggtatttaacaggaaatgaggtagttttgaccggatgcaagtgaaaattgttgattttcgcgcgaaaactgaatgaggaagtgtttttctgaataatgtggtatttatggcagggtggagtatttgttcagggccaggtagactttgacccattacgtggaggtttcgattaccgtgttttttacctgaatttccgcgtaccgtgtcaaagtcttctgtttttacgtaggtgtcagctgatcgctagggtatt

SEQ ID NO: 36 - DNA, 3452 bp, Human mastadenovirus B
tatacctcagggtttgtgtcaagaggccactcttgagtgccagcgagaagagttttctcctctgcgccggcagtttaataataaaaaaatgagagatttgcgatttctgcctcaggaaataatctctgctgagactggaaatgaaatattggagcttgtggtgcacgccctgatgggagacgatccggagccacctgtgcagctttttgagcctcctacgcttcaggaactgtatgatttagaggtagagggatcggaggattctaatgaggaagctgtaaatggcttttttaccgattctatgcttttagctgctaatgaagggttagaattagatccgcctttggacacttttgatactccaggggtaattgtggaaagcggtacaggtgtaagaaaattacctgatttgagttccgtggactgtgatttgcactgctatgaagacgggtttcctccgagtgatgaggaggaccatgaaaaggagcagtccatgcagactgcagcgggtgagggagtgaaggctgccaatgttggttttcagttggattgcccggagcttcctggacatggctgtaagtcttgtgaatttcacaggaaaaatactggagtaaaggaactgttatgttcgctttgttatatgagaacgcactgccactttatttacagtaagtgtgtttaagttaaaatttaaaggaatatgctgtttttcacatgtatattgagtgtgagttttgtgcttcttattataggtcctgtgtctgatgctgatgaatcaccatctcctgattctactacctcacctcctgagattcaagcacctgttcctgtggacgtgcgcaagcccattcctgtgaagcttaagcctgggaaacgtccagcagtggaaaaacttgaggacttgttacagggtggggacggacctttggacttgagtacacggaaacgtccaagacaataagtgttccatatccgtgtttacttaaggtgacgtcaatatttgtgtgacagtgcaatgtaataaaaatatgttaactgttcactggtttttattgctttttgggcggggactcaggtatataagtagaagcagacctgtgtggttagctcataggagctggctttcatccatggaggtttgggccattttggaagaccttaggaagactaggcaactgttagagaacgcttcggacggagtctccggtttttggagattctggttcgctagtgaattagctagggtagtttttaggataaaacaggactataaccaagaatttgaaaagttgttggtagattgcccaggactttttgaagctcttaatttgggccatcaggttcactttaaagaaaaagttttatcagttttagacttttcaaccccaggtagaactgctgctgctgtggcttttcttacttttatattagataaatggatcccgcagactcatttcagcaggggatacgttttggatttcatagccacagcattgtggagaacatggaaggttcgcaagatgaggacaatcttaggttactggccagtgcagcctttgggtgtagcgggaatcctgaggcatccaccggtcatgccagcggttctggaggaggaacagcaagaggacaacccgagagccggcctggaccctccagtggaggaggcggagtagctgacttgtctcctgaactgcaacgggtgcttactggatctacgtccactggacgggataggggcgttaagagggagagggcatctagtggtactgatgctagatctgagttggctttaagtttaatgagtcgcagacgtcctgaaaccatttggtggcatgaggttcagaaagagggaagggatgaagtttctgtattgcaggagaaatattcactggaacaggtgaaaacatgttggttggagcctgaggatgattgggaggtggccattaaaaattatgccaagatagctttgaggcctgataaacagtataagattactagacggattaatatccggaatgcttgttacatatctggaaatggggctgaggtggtaatagatactcaagacaaggcagttattagatgctgcatgatggatatgtggcctggggtagtcggtatggaagcagtaacttttgtaaatgttaagtttaggggagatggttataatggaatagtgtttatggccaataccaaacttatattgcatggttgtagcttttttggtttcaacaatacctgtgtagatgcctggggacaggttagtgtacggggatgtagtttctatgcgtgttggattgccacagctggcagaaccaagagtcaattgtctctgaagaaatgcatatttcaaagatgtaacctgggcattctgaatgaaggcgaagcaagggtccgccactgcgcttctacagatactggatgttttattttgattaagggaaatgccagcgtaaagcataacatgatttgcggtgcttccgatgagaggccttatcaaatgctcacttgtgctggtgggcattgtaatatgctggctactgtgcatattgtttcccatcaacgcaaaaaatggcctgtttttgatcacaatgtgatgacgaagtgtaccatgcatgcaggtgggcgtagaggaatgtttatgccttaccagtgtaacatgaatcatgtgaaagtgttgttggaaccagatgccttttccagaatgagcctaacaggaatttttgacatgaacatgcaaatctggaagatcctgaggtatgatgatacgagatcgagggtacgcgcatgcgaatgcggaggcaagcatgccaggttccagccggtgtgtgtagatgtgactgaagatctcagaccggatcatttggttattgcccgcactggagcagagttcggatccagtggagaagaaactgactaaggtgagtattgggaaaactttggggtgggattttcagatggacagattgagtaaaaatttgttttttctgtcttgcagctgtcatgagtggaaacgcttcttttaaggggggagtcttcagcccttatctgacagggcgtctcccatcctgggcaggagttcgtcagaatgttatgggatctactgtggatggaagacccgtccaacccgccaattcttcaacgctgacctatgctactttaagttcttcacctttggacgcagctgcagctgccgccgccgcttctgttgccgctaacactgtgcttggaatgggttactatggaagcatcatggctaattccacttcctctaataacccttctaccctgactcaggacaagttacttgtccttttggcccagctggaggctttgacccaacgtctgggtgaactttctcagcaggtggtcgagttgcgagtacaaactgagtctgctgtcggcacggcaaagtctaaataaaaaaatcccagaatcaatgaataaataaa

SEQ ID NO: 37 - DNA, 21483 bp, Human mastadenovirus B
ttggaggctgtgattggtcctcatagaacttgatttcataggggtggtaatcttccggagcaaacttgcgcaagtaggcggaggtccacagtcccggggtcagttttaaactttgcccaggagaagacccatcgccttggctgctggggccttgcaattcaaaggtgcctattatctgggtttcgctcatcaactgggggttgcaagctagggaccggtggggcgtgcacagattgcagcggcagtgacactccagcaagccgtctccgctcacatcctcgatcacatccgagtggtaggagagatagttggccagacggaacaggtagcagtgactccatagcggcggggggcactcgcggtaggtgagaggcacaaagtcggagggcagtgcgcagcaggtggcgggcaggataccggagcgttccaggatgaaagagcgaaaattgttaagcatgctctggctcataaagtcaggcaatccgtttcgcaaagtaaccctgagacgctctgggaagatgaggtctgccaggtcggaagcgacggtgcgctcgtcgaaccctgtccacagaaccttaagagatttctgtaagagcttgtcaagctctttcaagttctgttcttctaaacattgctgccatacacccatgccggtttgccacgtgtggcacaggtacagatagacacaatcgcggatgtaatcacggcgggcttcccccttcagggtgctgtgcagcacgctttgtcctaggcgattctcatgcagaatacccatgtaggaaaccaggttggtgagttccacgttagatatcttgcatgcctgccgcacaaagccgtgtctaaaagtgtagtgcagattctcttcgagtttgcgcaaggtttctgaatcggtaaagaaacgtcggagacactctagttctacggtaaccagcaccacggccatcataagcttgcgacgctcttccaaatccctgggagagtcggtgcccagccatcgggttagctgctcatcactgaccactggtttaccctcatcacaggcatctgggtcatgcatgtcttctgaaaggggacttgcgcgcttaatgagtaactggtccatgaccgccgtcatgactttagggggcaggttgacagcgggatatgcgaagtgtgtgacctcgatgcttcgcttgagtactgcgagtctggcattatcgccttccaattccaccagaacgctgtgatgctcatccatgccattttctcccttttgcagagcatttgcggcccgagtctcattattgcccagaccctcgaagatctttggaacctcttccaaggaagctatatcaggtaagcgtgaaccaggtcccagattgagtagggcatcggcgcgggtgcgattagcgcggcaggagactggaattttttgatttttaaaaaagatgtgataggtagccagtacttctggcacagcaaaagctggataaaagtttaagcgaggatttggctcgcaggtgccgtttggctgacgtttggggggagtacgaggtgaaaagaggttaagctcgtaggcgcggctgagctcttccacactgatgggcacttcagttctgtccaataatgcatccttgactatgagcgactgtcttgctagatgtttaaggagcgcgtcttccccgtcaagccctatgaggtagtcggtgttctgatccctatttccagcatcttggtgatagttatctgctcgttgttttgggcagttttcatcctctctctctagaaagcgtttcaactcttcctcgtgttccaccggtgtcacatagcccgggtcttgctcgatgtctgtctcagactctttcgcttttttattctgcatgtcatgagatgcgtcgacctccttatcttctagggtagaggtggtggcaggactgggcggtggaatgcttaagctctgctccttttcctcgtcgctgaggacgagatgtgatggcactcgtggcgatgttgacagcaatggctgagtttccatgtctgttgtttctctgcctaggagaacacaatggccagccgcgaaggaaatcagttaagcgaccgccacagggagcacacccccgaacgcggaaggggttctgccagtcatccgccttccaggtcggaccgcagcccttcgcaatcgcctccacctctgcccccgaagagaaacacctgtcgccgtgtggggtcaggttcttctaccgacagtcagttggtaatggtgagcgaaacgtcacaatcctccctgtctccggaacggagcgacagtcctcctcctccgataccccccaaaaagaagccaaggaagaccaaacatatccccatgcaagacatcagtcaagacagcgaagaagaaagagaagaggcgcaacttgtagcagtgggtttcagctacccgcccgtgcgcatcgttgagaaggatggcaaaagaagcattgagaagatcgctaaagatgaccctctggctaaaggagctgctgcctgcactgttaagaatccgattagcttgcccctggtgtctgcttgggagaaaggcatggaagtgatgtgtctgctgatggagaagtacaggctggataacgaacttagaacctcttttaaactaatgcctgagcaacacgaacaatacaagcgcatctgtcaccagtacgtaaacgaggagcaccgaggcatccagttaactttcactagtcacaagacactgagcacgatgatgggaagatttctgcagggaatgatacattctttttctcagatcgcccaccataattgggaatgtacaggctgtgcgttgtggcctcatggctgcaatgattatgagggcaagctgaagtgcctgcatggcaatattatgattcagaaggagcagattatcgagatggatgtggccagcgagaacggacaacgagccttaaaggagaatcccgagcgaaccaaaatcacccaaaaccgctggggcagaagtgtggtgcaaatagctaacaatgacgcccgctgctgtgtgaatgatgccggctgtgcagctaaccagttttcgagcaggtcctgcgggatgttttataccgagggtagtaaagcccagcaggctttcaagcaatatgatgctttcatgagagccgtgtatccaggaatcagacaggatcaggccaagatgatactgatccccctgcactgcgattgcaaccacaagcctaattgggtgcccgccatgggtaggcagacctgcaagatgaccccgttcagcattgccaatgctgaagatctggatgtgggcatgattgcagatcccaccgtgctggcaagcgtgagacatccgtcgctgatggtgtttcagtgctgcaatccggtgtaccgcaactctcgcgctcaaagcactggtcctaattgtgatttcaagatttcggctcctgacctgcttggagctttgcagctgaccagaaagctgtggagtgacatcctgcccgatataccggttcccaagttggtgattcccgaattcaagtggcaacccaagtatcagttccgcaacgtatcactgcctgcgggtcattctgattctcgtcagaacccattcgacttgtaaataaataagtaatgcagagccttgatacatgtaaaaaaataaagtgatgtttattgaacacgttgtttacatgagtcattattgaacatccatacggtcgaacgcagtggccctttcgatgtgtgtacgatgggagcgaaaataaggcgaatgggtattaagaaaatggtagagtgctttttgattgtcacacagggtgggctggactttaggagaatgaagcatgttgtttggcactccagttagcaatttcatggtggggtttccgtccatgggacggtcaggccagtgcacaaaggcgtgaaggaacatgcagcagaaaagtccgcaggcggcagaacggggaccctgcacggtctgggtagatttttccagcgtaatacagcggtccttggtagcaagagcgctgcggcgcaggagaccctcatattcaaactggtaaatctgtttgagacgatcatccgagaatccaaaaggatcaaaaaggtagcaggtgttagaacgtgggttccaaccgaaagccaaccagtgctctccccccgtctcacgtccggccgtatttacaatggcacaggcgagcttatcgggggccatgaaccccgggaagcgcttatcgtaggttcccaaaaaatagggtccgcaacccaggtcttggacaatggctctgagctcttgctcgctggagccgttttgggatccgcaggccatggttgcagctgctatttgcaagaagcaagaagcttcttacgtggtagcgttaccggccgagaacggtgtacgcaggtagactgcctcgatgatgccgcggtgtggctgatgcactctgaccacgtcgaaaacttcgaagagaagataaagcagggtgggctcatccatgggatccacctcaaaggtcatgtccagagcatgagctgagttggcatagagcatattctgtcccaagtctgtaagggcccccatagacatgaagttgctcgagaacggtatgcgccacatggttctgtcacacaagaactttttctgcgtaacactatttacggcagttgttccaatgagtggatagggatagttagcgggatagggttgaccttggcgcatggtcggagccatgtaacccacaaagccagagttgttgtgttggtagggtatggcgacggccttgaagtctttgtaattgacctcatcaaccacctgcctgctcatgggctggaagtttctgaaaaatgaatacatgcgatctttgtatccttctggaatgtagaagccctgatagccgatgttgtagttggcgagcatctgtaccaagaaccagtctttggtcatgttgcattgggctacgttgtagccttcgccatccacagtgcgctttatttcaaattcgttaggagatagtaacctgtcatttccaggccagctcactgaagagtcaaacatgatggaaaccttcttaaaagtgtggttcaggtagaaggtaccatccaggtagggaatagaaccagaatagacaaagtaggggtcaaatccagaccccaaagagggagtttctttggttttcagtctggtaaatgaccagcctctgaaagccgcccagttgcgagaaggaatggaaatgggaatattggttgcattggcaggaatggggtagagcatgttagctgcagataggtagtcgttgaatgactgatcattggtgtcattccgcagcatggcttcaagggtggaagcggtgttgtgagccatggggaaaaaagtagcatagaggttgatgctcgtgaaactgatgctggcgccatctacccgcaggtcgttaccgagggaactctgtagaaccatgttcacatccttcctaaagttccactcataagtgtaggagcctgggagaagcagcaggtttttaacagcgaagaatttttgaggcacttgtatgtggaaaggcacataacgtccgttacccagaagcatggatcggtaacgcaagccagcgttacggtggtggttgaatgggttgacattgtccatggcatccagagaccacctggcaccaatgttcacataggtgtctactagagatggcggcaccacccgcccgttcatgtagtcgtaggtgtttttgttttctggaagagtgacattggacggggtgtatttgtacgagtctgggagatatagagccacattggaataaaggaaacttcgccatagattggcttgaaggttaatttccatggcaaacaaattaccctgtccgatctcacttgttccatttacttcaggttccttccaattaggcgcattgtctccatttggaactattgatttgtaactggttgttggaacacctatgccgtccagtggaaaacagtagttgggaagttcatcttccacaccatgattttcaataacacgtacatcaggatcataactgtccacagcctgattccacatgctaaagtatctggttctgtcgcccagagagtcaagcaagagttggtaagaaagttctgtgtttctgtcctgcaagtcaaccactgcatttaactgagacgcttgaccagccagcacccccatgttaccagtactgttatagtacataagtccaataaagttatctctgaagccaatgtagttgggtctgttgggcatagattgttgtcccaaattagcttcggaacttgtgtcttctgttccaggtttgtacactacatgagtgtctggagtttccaaatttacattttctgcatacatgacaattttaggacttaagtttgttttctgcgatgccgcatcaaaaaactccatgtcgatatcatattcgactttctgatttggctgctccgttgttttttgttttgcctgaccgcctttcacattagtaggtttggcaaaggacccgtagcatggtttcatcttagtatcgggtttgagagccctgcctccatacttttcggtttttccatcaaggtcagtccaagtttcatctcccagctgaggttctggctgatatgttttatcagcataaatcggtttactttcttcatctgaaacttccaaacctactgggagtccttcttttgtaatttcagcttcagcttttacaggagcattgccaaaagtgtaagtagtagtattggtttcctcttctgttacgtgttcctcaccagttgtattttttacaccttctgcaatccactgagatgtatttggagcgcctttaggagccagggagttgtaagccgtaccagaatagggtttgaaactgggacctctgtccaacacacccctaatgtcaaagaacgtgctggccatatccagcactctgttgtcgcccacggccagggtgtaccgcactttgtaagagtatgtattgtcctcccggtcaacgggcacgaagcgcaacatgagccgctggctacggtcggtggtcacatcgtgggtcggcgctacggtgggatttctaaacttatttcccagattgaagtaggtgtctgtggcgcgggcgaactgcaccagacccggactcaggtactccgaagcatcctgtccggcgatgtgcatgtatgcccattggggcagcatcgatggggtggccatcttgaaagtaactcagcgtcgacgcacgacctcttccttttttcctctgctgctgtgacggcgtgtaatgacacatatacacagataggcaagttaagcgctactccatatttaattaaaagcagcgacggcgttttacactttgcacgcctagacccacgatgctgttcagagtattttgccagtgcgcatttggacgaggagcgcccccgggacgtgacctggctacggcgactggtttcggggcagcgacaggcttagaagcgggtacagcagtagcagcagggggagggggcaaatccaaggtgacgggtcgatgcaactgagaaggtttcatcaccccggtggccattggggctatcggtctagtggtgggcattccaagcttcgttgcttcctcataagaaggcggttcatctacgcgcgtcaccagcgtctcttccaaatcgggacgcggacgcttgtcgcctcgtttttctggcggaggaatttcttcctccacttgcatttcacctggggttgctggcggcgggtccaaacgactgtttatctttttctgcacagcctggttagccaaatctaccactccattgatgccggaagctatcccatcgactactttttgttggaagttctggtctttaagtttatttctaagcgcctgtcctgtactgctgttccaagctttgttcccgtatgtttttatggttgagccaaaatttttaagcccgctccagatactgctccaattgaaggcgcccccgttcagttggctcgtgccgatgtcgctccaggtgcccatgtacggcttcgtgccgtgtcgcggagccaaggatgaaaaattgatgtcttccatctctaagaaaacatagtcacaggaccaggagtgtcagagtccattgtatttttttttttttatttatacgtttttttccaatgtcaatgtcgttgcgaggcctgaaccgccacggaagctatgcctggtatcgcgccaattgcagcagcgataattggaattaaggctggtaaaaaaccaccccgcaattgcttgcggatagcacgccgtcgcctgtagcgtcgcattccgcgtcccaacatccctcttctacggcgcgagtttcttcctcggtaaccagtgatgggaacgcgaaggcgacaagtgagggccatatctgcaaggaggcagcggcaacattgattaagtgatgatactcggatggtaacgcgcacgcggcagtgtcaaaggttccgcactaccattgcggtacacttgccgcaccagggcgccgggagtcggtttgcttgtgcgtctacggcgacgactgcgatttgcaggtgtcttgcggcgacggcgggaggtactgtttcggctgcgatagtagcgagtgcctcggtaaccaggagtaggaataatagatgggtgtacaacataattgggcatcaacagacttgctggaccgtactttcgtcgggatcttcgagtgggaccggcggcgtcagttgtaataggcatgggcatccatggatccgtttgcacttcagtggaggtggcagtaggctttgcgggttcagtttgcacttccatactttcagtgggaatcttaatgtctacagtttgtacccccagaccaggcgctacctgcttaatgggtctcactttaacctcaggttgaatatctggatccacttttactttctccaaaacgtcctccaacttctggcgtttgggtaccatcagttgcatagtgggatacaaatcttcaccttcgcgtttaacacctgttcgcggagttacgggtaacacttgctgcaaagtgaccggtttaagactaggggtgggatttccatgatccaagggtatcgacactgtctcatccttggaagttattctactacgcttgccataagcaaactcgcctaatcggtcagccgcctgctcaagaatatcatcatccccgtacacctcatcataggaacgcttaaaagtagcgcttgaacgctcgccgggtgtaaagaccaccgaagttccaggtctcaacacatgtcgaactttgcgcccacgccattgcacgcgtcgccgtggggcaaactcgcgcacaaactccgccagcccatcatcgccatcttcctcttcttttttgtcctttttaacccgcttgattttgcggggttttttttcatccttcaacggttggccgtagacttcaggtgcgataacctgcagcatttcttccttgtatttgcgcttggacatcctcgccgctgggacacaacatcggagactgctcagtatcttctaagtgcgagggggacgggtgcgcacgggtacacgttgaccggtggcagcgtcacgcacccagtatacattgcctcttcgcgattgggccatgtcggcaatagtcgccgctgcgacagcggctgcttgcctgcgggacctgccggcgctggcgcccgaagctgcacgtctggccgccctaagcatggctcttcgccccacgcgtctagctcttcgtagcagagctcttgcggctcgcatggcagtggtagctcggtggcgtctggcaatgcgccttcgccggctcttacgtcgagcatagttgcgagcgtcagccactacactgtcaataactgcatccacagtagatgtaggcgcagtaggagtataattacgggcgtcggcaaccacctgatcgattacatcatcgacggtggttcgaacgcgagtgcggcccttgagggcgccccatggagcgcgaaaatgtccgcgaacacggacaggatgttgggtagaacgtttgcgtgcgcctccgtacatcttgcttggagcgcgcagaccccaaccggtgttattactgggcgagataagaatggacattttttttttttttagaaagtgcggcttgaaaggacgcgcggtgcgactatgcccagtgccttgtacacgtagggacaggtgcggcgtctggcgtcagtaacggtcacacgttggactccccggatactgctgcgcaacggcagggtcccgtgatctgtgagagcaggaacgttttcactgacggtggtaatggtgggcgccggcggacggattaaaatctggttctcaggaaagcggttgaagacgtgcgtaagcgaggtggactggcggagctgctgggagtacacagcttgttcgttgtagaagctctttgagaagacgggcataagctctgcacccaccacagggtagttactgacttgtctagtggagcggaaagtgacaggatccttcatcatgtctggaagcgaccagtagacctgctctgctccgcaggtgacatctgaggtggtgagcaatgtccaggaacgcactcctttttcgggatcgccataattgtacgaaagataccaactgcgataggctgtgttgattttgtcttccaacacattatagcttctattcttactatctttttctacaggttgaatagtgagtttcacgtccgttccttcagacacatcggccaataatgattctgcagtcggaacaggtgttggcgcaaaattgtctcctctgacctctccagcgttagcaacccttgtagagtcgctggcaactatgtttgccttagcttctgcagcagctgtagcagcttctattttggctttttgttctttcttactgttctcataggcatctacatccaagagggccggaatattaccaccttctaaatcttcatacaaaatcttaaaaccctcttgaaatggctgtttttttctgataccaagaaggttgctcaaacgactctcggtaaaatccactccgcagccaggcagtaagacaatgtcaggatggaaggcttcatacgtatacactccaggcatgatcaacttggtttcgggatcccatcccagcttgaagttcctggtgtcgaacttaacaccaatgtcactttcaagcactccattctgtctacccactttcaagtaattatctatgatggcattgttcatcaaatcaatagtcatagtaactgaaaagttgccttctggcaaagtaaactcgaaccactcatatttcaaaatatcctgcttgtgatcataagtatccccaactgcagcaccgtcgggaggttttctggacaccatcacacgcgctttgaacttgttactaaacatatactcgttcacgtttggcatgttagtatgcatgatggtctttagctgaccgccccaccgcgatcgttcatcaaagttaatggtctgggtgctggcttccgtaggggtaaagtcattgttttgcaccaccgtggtcaagaagttgctgtggtcattctgatagttcagagaagcaatgtccgccgacttgttgtccaccagatacaacctggtggtatcgtactgaggtgccagttccgaataacgaatgctgtttctgccctccgtaggtgccaggtatcgcggaggcacaaagggagcctccagtggggattgcatcaccgccgtcgcctgctgctgctgcatcacgctctcgtacgaaggaggaggaccctccggatacaccaccgctccgcctagcacgactcgcctcattatactagacacagataataaagaagaacgaacgtacgctcgtcgccatggccttggtgagttttttttttatttttttttacaacataccacccaagcgagggcgcaaatgagcaaacgggttgccccttcctctcccacccaagtccagcacgctgctatcatcggccgaatcctcatcgtcccacacaagacccctctgtctgtcatggcgctggcgtctacggctcgctctacttgtaatccccatgatcccaggctcgtctctgtgatcctgagcataagtcttccatctactcattttatccaccaaactttctattccattgtttgggaaatttttttctcttgccggtctgagcaaggaatcgtttagatactcctcttcgcccattaaactcgggcgacttattctacccacttcgctgctacgtacactgtgtagagaaaagggtagactaggaaaaggacttgcagactcgggctcagccgcggtagcacccatgaccccggacagcgatgcagaagaatgcattctatcgccgccttcctttttccacgtgcgatgatcagaaagaggtgaaaaaacatcgctgtccacgtcgtcccacagaaatccgtcattagggtcgggcatgtcatattcgcccgtgtagaaaccaggtgggggcagccagtgcgggtttaagatggcattggtgaaataatcagagttcatagcggcagctctgtgcaagtagtccagcagtttgttaatgaaaggtcggttactggcatacatgctgggctccatatttcgcgctgtcatgtccagtgctgcagtcggagttgccccctcttgcatcagaaacaatcccacgctctgctgcacatatctaaggatcctctcctcctccgcagtaagagcatattgaggagggatcttttgagaccgattggtaagcaagaagttcagagtggcttccaaactgccagtgtcttcctgtcccaaagcgcgactgacttgggtaatttcttgataggtctgctcgtccacctgactttgccctatggcttcgcgatacaggtttagtaggtaacccaaataggaattacggtcgatgctaccgctgtcggtgaaaggagctaccaacagtaataataggcgggagttcggagttaacaagctagacacggttgctctttctcctaccggggcatgcactccccacaaacctttaaggtttttaaaagcttggctcagatttaccgtctgcaagccctgtctgctagtctgaaagaagtaatcaggaccggactgatacacttcgctctgaggtacttctgataccatcagtctcaaagcgcttaaaaagttagtataatcctgttgaccacgcggcacattagcaggctgagtactcaagaaagcatttaacgccaccagcgaacccaggttggcatcacgctggaacctttcgcgctgagacacggcttcgcgtacatctgttatcatacggtccaaattggtttgcacattgctactgttgtagcgagccacgcgttctaagagagcgttgtataccagtccggcctcatctggacgaatagctttgttctccaccaacgcgttcacgatggccaggaccttctcatgagtgggattagagcgggaaggcactacagcttccatgatggccgatagacggttggcctggggttgctgtctaaaggcttcggggttgcgagtcgtcaacgccatgatacgttgcatggcctgggtccaatcgtccgaggagttaatgccggacggctggctctgcagcgccgcccgcattgcgggatccggtgcttgctgttccatctagcaaaaaacacgggttgtgccatcagtcttccaagtactcgccctcttcctcctcgccttcatccgcctcttctatgtaaggaagctcacatcctgccgtcgcggcgctcagagccctgcgactaggctgccactgcaagtcagctcccatgtcgaagtaattctcaccctcggttccagctccagtcagagctctttgcaaactgtgcatcagttccctgtcgcttaactcgcgcctcctgctggcgctaaccgcgcgatgcattctgtcattgcgatacaccccaagatcatcgctcagggtcaagaccttgagcgtcatgcgcatgtagaacccatctatcttcacctccttgtctatgggaacgtatggagtcttgtagattttgcgagcgtaatattttcccaagctcaaaaccgagtaattgatggcagccaccttctcggccaggcccaggctccgctcctgcactatgatactctgtagaatgttgataagatcatacaaccatctcccctcgggttcggtgatgttcagcagcgcctctctgaaagcctcattgtctctgctgtgttgcaccaccagaaacagctgggcggtcagaggtttgctagtagggttctgaatgatagcttccatcaaatcccacaaatgcatcaaaccaagggtaacttcttcgcgggcaatcagggttcgcacatgattattaaaagacttttggaagttacgctcttcctttactgtctgctcgtaagccgatacaaggttggctgcagccacgtgtgccctggcaggactgatccctgtcatttcatcaacttcgaaatcctcgtcccgcaacactcgtcttcggtccaaaccgtgacgcagctcacgacccgcgttaaagcgggaagctcgcatctcctccggctcctcgccgcttctgtctctaaataggttctgttggggcacatacgcctcgcgagaatcttttttcagttgaactcgcggatgccgctcgggtgaaggcgcacctagacgtgccagtccttcgccctcttccaagtccagatcataggcgggctgtcccgcaccgctcacggcggcagttgcagtagttgcagggacagccttttgtgattgctgctgctgctgctgcgaggggggctgttgttgggggcgcatctgtcgcagcacgggatgcatctgagcggcaaaaaaaaaaaataggactcacttccctgccattcggaaaccagcaaaacgactcgattccgtatcctggatttttgtaggctgggtcgagacgggagtgccaataccacgttagccgcggctccggccggctcgagtacaagtctcgaaccggggtacaccgcgacccaacccgttcacgttcctccaggctacggagtcgagtcgctgaacgctttcattttctccgtgtctatagagcatcaatgactgcgcgcgcctcactggtcaaaccgtgcctacaatgaactacttcatgccgctacgcaacatttggaaccgcgtacgcgagtttcctcgggcttctactaccgccgcaggaatcacctggatgtccaggtacatctacggctatcaccgccttatgttggaagacctcgcccctggcgctccagctacagaacgatggcctctctaccgccaaccaccgccgcattttcttatagggtaccagtatctggtgcgcacctgcaacgattacatctttgacacccgcgcctattcgcgccttaaatacaccgagctcgtgcgccctggtcaccagacagttaactggtcagtcatggccaactgtgcttacaccattaatacaggagcttaccaccgctttgtggattttgatgactttcaagccacccttacccaagtacagcaagccatcctcgccgaaagagtcgtagctgacttggcactggtacaaccaatgcgcggatttggactcacacgtatgcatggcagaacgggtgaggaagaagtgcccgtagaacggctcatgcaagactactacaaagatcttgctagatgtcaggataatgcttggggaatggccaatcgcctgcgtatccagcaagccggacccaaagacctggtgctcctcgccaccatccgccgtcttagaactgcctactttaatttcatcaccagcagcatcgtctcaccttcccgagatgaagaagaaacagaagacccagaccgaacacataaccacccccgcccacaagaagccgtactcagcctaccttgtgactgtgactggttagacgctttcgtcgaaaggttttcagatcccgtggatcttgacacgatcagatctctgcgtgcagtccctacgggccaattaataaaatgtataatcagcgccctctccctcccaaacggagaacctcccagtcaccactttaaggagatgcgcggcggtgtttttactctgcgaccgcgcgagaacggccgcgccgtcactgaaaccatgcgccgccgccgcggagaggtcattgaacgattcatcgaccgtttgcccgtgcgccgtcgacgtcgccgcgtgccccctccgcccccgcctgaagacgaagaagagatgttagtggaagaagagatagaagaggaagaagagatcccgggagccttcgaacgcgaagtacgggccaccatagccgaactcatccgtcttctcgaggaggaattgaccgtgtccgcgcgaaactcccagttttttaattttgccgtggacttctacgaggccatggagcgcttggaagctctgggcgatgttagcgaaatgccgctgagacgatggatcatgtatttcttcgtcgccgaacacattgccaccacactcaactacctttttcagcgcctatgcaactatgcggtcttcaccagacacgtggagcttaacctcgctcaggtggtgatgcgcgcaagagactccgagggggccgtggtttacagccgcgtctggaacgaggcgggcatgaatgcattctcccaactcatgggccgtatctccaatgacctcgcggccaccgtcgaaagagcgggtcgcggagatcttcaggaggaagaaatcgagcagttcatggcggagatcgcctaccaggacaactctggtgacgtacaagaaatactgagacaagctgccgttaacgataccgaaattgattctgttgaactctctttcaggttcaagctcacggggccggtagctttcacccagagacgtcagatacaagacgtcaatcgacgcgtggtggcgcacgcaagtcttctcagagcgcagtaccagaacctgcccgtgcgcggcgccgacgtgccactaccagccatgccctcgggtccggaacaaccgctgccgcccggcgcgcgtccccgtcaccgcttctgagcatgcaagaagcaagagagccaccaccgatcaaaagaaaaaacaaaggtacggtagtggcgcccaaaggacacggaaccctgcaagccattgacgtctctacaaacgaacctgtggaaatcaagtaccatctgaacctcccgcacgccctggaaaagatcatgcaagttaatcttctgtccctacctactaacctgagtccgcagcgtctcaggactctggacagctccagcctgcgcgctctcgtccttcagctccgcccctcccgcgccgaggtctggacttgcctcccgcgggggctcgtcagcatgaccaccatcgaaacagaagatgaacaggccgatacagcgaatatagaagagcacgagatacaatcgccaggcctcggcttcccactgaaatttctcgtcaagggaagccaggtacaactcattcacgagatacaacccgtgcaacgctgcgactactgcggccgtctgtacaagcacaaacacgaatgctcggcgcgccgcagaaacttctacttccatcacatcaacagccaatcctccaactggtggcaggaaatccagttcttcccgatcggctctcatcctcgcacagaaagactcttcctgacctacgatgtggaaacttacacctggatgggatcctttggcaaacaactagttcctttcatgctggtcatgaaactctcaggagaagagcgtctcgtcaacatggcccacgatctagccattaaactcaagtgggatcgatggcaacaagaccccagaaccttctactgtgtcactccagaaaaaatggcaattggccggcattttcgtcagtatcgggaccagttacaaacagcactggcggtagatctttggtcatcattcctacatgcaaatcctcacctgcacgaatgggctctcgaacactacgccttatctgaccccacagacctaacctttgatgagctcagtaagctacctcacgtcagaggcacgccgcgtttcatagaattatacatcgtaggacacaacatcaacggtttcgacgagatcgtcctagctgcccaggtgatcaacaatcgagcggaagtaccacagccttttcgcatcactcgcaattttatgcccagagccggtaagattctcttcaatgatgttactttcgctttgcccaaccccgcctacaagaaacgggtagacttccaactctgggaacagggagcctgtgacgacatcgacttcaaataccaatttctcaaagtcatggtcagagacacctttgcccttactcacgcttcgctacgaaaagctgctcaagcatactctctacccgtagagaagggctgctgcccttacaaggcagttaatcagttctacatgctaggatcttaccgtgcagacaaagacgggtttccgctagaagagtactggaaggatcgcgaagaataccttctcaaccgcgaactgtgggaaaagaaaaaccaaccaggttatgacatcattcaagaaacacttgactactgcgccctagacgtacttgtcaccgccgaactggtaaccaagcttcaagaatcttatgcccactttgtcagagactctgtaggtctacctcatgcccatttcaacatttttcaaagacccaccatctcttccaattctcacgccatctttcgccagatcgtctacagaacagaaaaacccaatcgcaccaacttgggtccggggctgctagcgccatcacatgaactatatgactatgtgcgagcaagtatcagaggggggcgatgctatccaacctacataggcatctttgaggatcccatctacgtctatgacatctgtggcatgtatgcctctgcactcacccatcccatgccatggggcagtccccttaacccatatgagcgcgcactggcagctcgagaatggcaaatggccttagatgaccccactcccatcagctattttgataaggatttacttccgggaatctttaccatggatgcagaccctcccgatgaacttatgctagacccacttccccctttctgttctaggaaaggaggtaggctctgttggaccaatgaaccccttcgaggcgaggtggccaccagtgtggatttaattaccttgcataatcgagggtggcaagtgagaatcgtgccagatgaattaacaactatcttccccgaatggaagtgcctggcacgcgagtatgtccaactcaacatcgccgccaaagagcgcgcggacaaggaaaagaaccaaaccatgcgatccattgccaaacttttatccaacgccctgtatggatcatttgccaccaaacttgacaataaaaaaattgtgttttctgaccaaatggacgaaaacctcatgaaaggcatctcaaccggcactgtcaatatcaaatcctcctcgttcttagaaactgacaacctgagtgcagaggtcatgcccgccttcgagagggaatacctaccccaacagctgacgttcctggacagcgatccggaagacagtgaggaagagcaaagaaccgcccccttttatacccccccagcggggaccccaggtcacgtgaaatacacctacaagccaatcacattcctggatgttgaagagggtgacatgtgtttgcatactttggaaaaggtggaccccctggttgacaacgatcgctacccctcccacatagcctcctttgtgctggcctggacgcgcgcctttgtatcagagtggtcagagttcctgtacgaagaagaccgaggcactccactggagaagaggcctgtaaaatcagtctacggggacacggacagcctgtttgtcactcaacgaggacacgaactcatggagaccaaaggtaagaaacgcatcaaaaaatatggcggaaaacttgtttttgaccccaatgaaccggatttaacctggctggtggaatgtgaaactgtttgcgcctcctgcggcgcagatgcatactccccagaatccgttttccttgcgcccaagttgtatgcgctgaaatgcctatactgcccggtatgcaagaaaacttccaaaggtaagctccgcgccaaaggccacgcagccgaggcgctcaactacgaactcatggtaaactgctacttggccgacatacagggcgccaagcgacagaagttttcgaccagcaggatgagtctgaagcgcaccctggcaagcgcccaagcaggcgcacaccccttcactgtgacggaaacaaccctgactcgaacactgagaccctggaaggaccgaaccctggcagcgctggacgcccatcgtctcataccctattccaggagccgtccaaacccgcgaaacgaggaggtctgctggatcgagatgccatagaacacatcactgaactgtggaacagactagaacttttgcagcaaactctctccaaaatgcccatggctgacggtctgaaaccgctgaaaaacttttcctcactacaagaacttctatcactaggaggagagcgcctcctaatggatttggtgcgggaaaatatgcatgtaagggaaatgatgaacgaggtggcccccttgcttcgagaagacggcagttgccgttccctaaactaccacctgcaacccgtaatcggaatcatttatggccccaccggatgtggcaaatctcaattgctcagaaatttgctatcatcacaattaatcacccccgccccagaaacggtgtttttcatagccccccaggtggacatgattccaccctcggaactgaaagcttgggaaatgcaaatctgtgaggggaactatgctccggggcccgaaggaacattcataccccaatctggtactctccgccccaaattcattaaaatggcttatgatgatttaactcaggaacataactatgatgtgtcagacccacggaacgtgtttgcccgcgccgctgcccacggccccattgctattatcatggatgagtgcatggaaaatcttggaggacacaagggtgtctccaaatttttccacgcttttccatccaagctgcacgataaatttcctaaatgtaccggatacaccgtcttggtggtccttcataacatgaacccaagacgggatcttggcggcaatattgccaacttaaaaatccaatccaaaatgcacataatttcaccccgaatgcacccatcccagctcaaccggtttgtaaacacctacaccaagggcttatctgtggcaatcagcctacttctaaaagatattgtgcaacaccatgcactgcgaccttgttatgactgggtgatttacaacactaccccggagcatgaatcccttcaatggagctatctccaccccaaagacggcctaatgcccatgtatctaaacattcaatcccacctctataggatcctggaaaaaatccaccgagttctcaatgatagagatcggtggtctagggcataccgtgcgcgaaaaatgaaataaa

SEQ ID NO: 38 - DNA, 3759 bp, Human mastadenovirus B
tataaaacgcctgatgatcagaggccgaggtatccagctcaacgacgagtcggtgagctctccgcttggtctacgaccagacggaatctttcagattgccggctgcgggagatcttccttcacccctcgtcaggctgttctgactttggaaagttcgtcttcgcaaccccgctcgggcggaatcgggaccgttcaatttgtggaggagtttactccctctgtctacttcaaccccttctccggatctcctgggcattacccggacgagttcataccgaacttcgacgcgattagcgagtcagtggacggctacgattgatgtctggtgacgcggctgagctatctcggctgcgacatctagaccactgccgccgctttcgctgctttgcccgggaactcattgagttcatctacttcgaactccccaaggatcaccctcaaggtccggcccacggagtgcggatttctatcgaaggcaaaatagactctcgcctgcaacgaattttctcccagcggcccgtgctgatcgagcgagaccagggaaacaccacggtttccatctactgcatttgtaatcaccccggattgcatgaaagcctttgctgtcttatgtgtactgagtttaataaaaactgaattaagactctcctacggactgccgcttcttcaacccggattttacaaccagaagaacgaaacttttcctgtcgtccaggactctgttaacttcacctttcctactcacaaactagaagctcaacgactacaccgcttttccagaagcattttccctactaatactactttcaaaaccggaggtgagctccaaggtcttcctacagaaaacccttgggtggaagcgggccttgtagtgctaggaattcttgcgggtgggcttgtgattattctttgctacctatacacaccttgcttcactttcttagtggtgttgtggtattggtttaaaaaatggggcccatactagtcttgcttgttttactttcgcttttggaaccgggttctgccaattacgatccatgtctagacttcgacccagaaaactgcacacttacttttgcacccgacacaagccgcatctgtggagttcttattaagtgcggatgggaatgcaggtccgttgaaattacacacaataacaaaacctggaacaataccttatccaccacatgggagccaggagttcccgagtggtacactgtctctgtccgaggtcctgacggttccatccgcattagtaacaacactttcattttttctgaaatgtgcgatctggccatgttcatgagcaaacagtattctctatggcctcctagcaaggacaacatcgtaacgttctccattgcttattgcttgtgcgcttgccttcttactgctttactgtgcgtatgcatacacctgcttgtaaccactcgcatcaaaaacgccaataacaaagaaaaaatgccttaacctctttctgtttacagacatggcttctcttacatctctcatatttgtcagcattgtcactgccgctcatggacaaacagtcgtctctatccctctaggacataattacactctcataggacccccaatcacttcagaggtcatctggaccaaactgggaagcgttgattactttgatataatctgcaacaaaacaaaaccaataatagtaacttgcaacatacaaaatcttacattgattaatgttagcaaagtttacagcggttactattatggttatgacagatacagtagtcaatatagaaattacttggttcgtgttacccagttgaaaaccacgaaaatgccaaatatggcaaagattcgatccgatgacaattctctagaaacttttacatctcccaccacacccgacgaaaaaaacatcccagattcaatgattgcaattgttgcagcggtggcagtggtgatggcactaataataatatgcatgcttttatatgcttgtcgctacaaaaagtttcatcctaaaaaacaagatctcctactaaggcttaacatttaatttctttttatacagccatggtttccactaccacattccttatgcttactagtctcgcaactctgacttctgctcgctcacacctcactgtaactataggctcaaactgcacactaaaaggacctcaaggtggtcatgtcttttggtggagaatatatgacaatggatggtttacaaaaccatgtgaccaacctggtagatttttctgcaacggcagagacctaaccattatcaacgtgacagcaaatgacaaaggcttctattatggaaccgactataaaagtagtttagattataacattattgtactgccatctaccactccagcaccccgcacaactactttctctagcagcagtgtcgctaacaatacaatttccaatccaacctttgccgcgcttttaaaacgcactgtgaataattctacaacttcacatacaacaatttccacttcaacaatcagcattatcgctgcagtgacaattggaatatctattcttgtttttaccataacctactacgcctgctgctatagaaaagacaaacataaaggtgatccattacttagatttgatatttaatttgttctttttttttttatttacagtatggtgaacaccaatcatggtacctagaaatttcttcttcaccatactcatttgtgcatttaatgtttgcgctactttcacagcagtagccacagcaaccccagactgtataggagcatttgcttcctatgcactttttgcttttgttacttgcatctgcgtatgtagcatagtctgcctggttattaattttttccaacttatagactggatccttgtgcgaattgcctacctgcgccaccatcccgaataccgcaaccaaaatatcgcggcacttcttagactcatctaaaaccatgcaggctatactaccaatatttttgcttctattgcttccctacgctgtctcaaccccagctgcctatagtactccaccagaacaccttagaaaatgcaaattccaacaaccgtggtcatttcttgcttgctatcgagaaaaatcagaaattcccccaaatttaataatgattgctggaataattaatataatctgttgcaccataatttcatttttgatataccccctatttgattttggctggaatgctcccaatgcacatgatcatccacaagacccagaggaacacattcccctacaaaacatgcaacatccaatagcgctaatagattacgaaagtgaaccacaacccccactactccctgctattagttacttcaacctaaccggcggagatgactgaaacactcaccacctccaattccgccgaggatctgctcgatatggacggccgcgtctcagaacagcgactcgcccaactacgcatccgccagcagcaggaacgcgcggccaaagagctcagagatgtcatccaaattcaccaatgcaaaaaaggcatattctgtttggtaaaacaagccaagatatcctacgagatcaccgctactgaccatcgcctctcttacgaacttggcccccaacgacaaaaatttacctgcatggtgggaatcaaccccatagttatcacccagcaaagtggagatactaagggttgcattcactgctcctgcgattccatcgagtgcacctacaccctgctgaagaccctatacggcctaagagacctgctaccaatgaattaaaaaatgattaataaa

SEQ ID NO: 39 - DNA, 978 bp, Human mastadenovirus B
atgaccaagagagtccggctcagtgactccttcaaccctgtctacccctatgaagatgaaagcacctcccaacacccctttataaacccagggtttatttccccaaatggcttcacacaaagcccaaacggagttcttactttaaaatgtttaaccccactaacaaccacaggcggatctctacagctaaaagtgggagggggacttacagtggatgacaccaacggttttttgaaagaaaacataagtgccaccacaccactcgttaagactggtcactctataggtttaccactaggagccggattgggaacgaatgaaaataaactttgtatcaaattaggacaaggacttacattcaattcaaacaacatttgcattgatgacaatattaacaccttatggacaggagtcaaccccaccgaagccaactgtcaaatcatgaactccagtgaatctaatgattgcaaattaattctaacactagttaaaactggagcactagtcactgcatttgtttatgttataggagtatctaacaattttaatatgctaactacacacagaaatataaattttactgcagagctgtttttcgattctactggtaatttactaactagactctcatccctcaaaactccacttaatcataaatcaggacaaaacatggctactggtgccattactaatgctaaaggtttcatgcccagcacgactgcctatcctttcaatgataattctagagaaaaagaaaactacatttacggaacttgttactacacagctagtgatcgcactgcttttcccattgacatatctgtcatgcttaaccgaagagcaataaatgacgagacatcatattgtattcgtataacttggtcctggaacacaggagatgccccagaggtgcaaacctctgctacaaccctagtcacctccccatttaccttttactacatcagagaagacgactga

SEQ ID NO: 40 - DNA, 273 bp, Human mastadenovirus B
aacggagttcttactttaaaatgtttaaccccactaacaaccacaggcggatctctacagctaaaagtgggagggggacttacagtggatgacaccaacggttttttgaaagaaaacataagtgccaccacaccactcgttaagactggtcactctataggtttaccactaggagccggattgggaacgaatgaaaataaactttgtatcaaattaggacaaggacttacattcaattcaaacaacatttgcattgatgacaatattaacacc

SEQ ID NO: 41 - DNA, 576 bp, Human mastadenovirus B
ttatggacaggagtcaaccccaccgaagccaactgtcaaatcatgaactccagtgaatctaatgattgcaaattaattctaacactagttaaaactggagcactagtcactgcatttgtttatgttataggagtatctaacaattttaatatgctaactacacacagaaatataaattttactgcagagctgtttttcgattctactggtaatttactaactagactctcatccctcaaaactccacttaatcataaatcaggacaaaacatggctactggtgccattactaatgctaaaggtttcatgcccagcacgactgcctatcctttcaatgataattctagagaaaaagaaaactacatttacggaacttgttactacacagctagtgatcgcactgcttttcccattgacatatctgtcatgcttaaccgaagagcaataaatgacgagacatcatattgtattcgtataacttggtcctggaacacaggagatgccccagaggtgcaaacctctgctacaaccctagtcacctccccatttaccttttactacatcagagaagacgac

SEQ ID NO: 42 - DNA, 1686 bp, Human mastadenovirus B
atgaggcgagtcgtgctaggcggagcggtggtgtatccggagggtcctcctccttcgtacgagagcgtgatgcagcagcagcaggcgacggcggtgatgcaatccccactggaggctccctttgtgcctccgcgatacctggcacctacggagggcagaaacagcattcgttattcggaactggcacctcagtacgataccaccaggttgtatctggtggacaacaagtcggcggacattgcttctctgaactatcagaatgaccacagcaacttcttgaccacggtggtgcaaaacaatgactttacccctacggaagccagcacccagaccattaactttgatgaacgatcgcggtggggcggtcagctaaagaccatcatgcatactaacatgccaaacgtgaacgagtatatgtttagtaacaagttcaaagcgcgtgtgatggtgtccagaaaacctcccgacggtgctgcagttggggatacttatgatcacaagcaggatattttgaaatatgagtggttcgagtttactttgccagaaggcaacttttcagttactatgactattgatttgatgaacaatgccatcatagataattacttgaaagtgggtagacagaatggagtgcttgaaagtgacattggtgttaagttcgacaccaggaacttcaagctgggatgggatcccgaaaccaagttgatcatgcctggagtgtatacgtatgaagccttccatcctgacattgtcttactgcctggctgcggagtggattttaccgagagtcgtttgagcaaccttcttggtatcagaaaaaaacagccatttcaagagggttttaagattttgtatgaagatttagaaggtggtaatattccggccctcttggatgtagatgcctatgagaacagtaagaaagaacaaaaagccaaaatagaagctgctacagctgctgcagaagctaaggcaaacatagttgccagcgactctacaagggttgctaacgctggagaggtcagaggagacaattttgcgccaacacctgttccgactgcagaatcattattggccgatgtgtctgaaggaacggacgtgaaactcactattcaacctgtagaaaaagatagtaagaatagaagctataatgtgttggaagacaaaatcaacacagcctatcgcagttggtatctttcgtacaattatggcgatcccgaaaaaggagtgcgttcctggacattgctcaccacctcagatgtcacctgcggagcagagcaggtctactggtcgcttccagacatgatgaaggatcctgtcactttccgctccactagacaagtcagtaactaccctgtggtgggtgcagagcttatgcccgtcttctcaaagagcttctacaacgaacaagctgtgtactcccagcagctccgccagtccacctcgcttacgcacgtcttcaaccgctttcctgagaaccagattttaatccgtccgccggcgcccaccattaccaccgtcagtgaaaacgttcctgctctcacagatcacgggaccctgccgttgcgcagcagtatccggggagtccaacgtgtgaccgttactgacgccagacgccgcacctgtccctacgtgtacaaggcactgggcatagtcgcaccgcgcgtcctttcaagccgcactttctaa

SEQ ID NO: 43 - DNA, 2847 bp, Human mastadenovirus B
atggccaccccatcgatgctgccccaatgggcatacatgcacatcgccggacaggatgcttcggagtacctgagtccgggtctggtgcagttcgcccgcgccacagacacctacttcaatctgggaaataagtttagaaatcccaccgtagcgccgacccacgatgtgaccaccgaccgtagccagcggctcatgttgcgcttcgtgcccgttgaccgggaggacaatacatactcttacaaagtgcggtacaccctggccgtgggcgacaacagagtgctggatatggccagcacgttctttgacattaggggtgtgttggacagaggtcccagtttcaaaccctattctggtacggcttacaactccctggctcctaaaggcgctccaaatacatctcagtggattgcagaaggtgtaaaaaatacaactggtgaggaacacgtaacagaagaggaaaccaatactactacttacacttttggcaatgctcctgtaaaagctgaagctgaaattacaaaagaaggactcccagtaggtttggaagtttcagatgaagaaagtaaaccgatttatgctgataaaacatatcagccagaacctcagctgggagatgaaacttggactgaccttgatggaaaaaccgaaaagtatggaggcagggctctcaaacccgatactaagatgaaaccatgctacgggtcctttgccaaacctactaatgtgaaaggcggtcaggcaaaacaaaaaacaacggagcagccaaatcagaaagtcgaatatgatatcgacatggagttttttgatgcggcatcgcagaaaacaaacttaagtcctaaaattgtcatgtatgcagaaaatgtaaatttggaaactccagacactcatgtagtgtacaaacctggaacagaagacacaagttccgaagctaatttgggacaacaatctatgcccaacagacccaactacattggcttcagagataactttattggacttatgtactataacagtactggtaacatgggggtgctggctggtcaagcgtctcagttaaatgcagtggttgacttgcaggacagaaacacagaactttcttaccaactcttgcttgactctctgggcgacagaaccagatactttagcatgtggaatcaggctgtggacagttatgatcctgatgtacgtgttattgaaaatcatggtgtggaagatgaacttcccaactactgttttccactggacggcataggtgttccaacaaccagttacaaatcaatagttccaaatggagacaatgcgcctaattggaaggaacctgaagtaaatggaacaagtgagatcggacagggtaatttgtttgccatggaaattaaccttcaagccaatctatggcgaagtttcctttattccaatgtggctctatatctcccagactcgtacaaatacaccccgtccaatgtcactcttccagaaaacaaaaacacctacgactacatgaacgggcgggtggtgccgccatctctagtagacacctatgtgaacattggtgccaggtggtctctggatgccatggacaatgtcaacccattcaaccaccaccgtaacgctggcttgcgttaccgatccatgcttctgggtaacggacgttatgtgcctttccacatacaagtgcctcaaaaattcttcgctgttaaaaacctgctgcttctcccaggctcctacacttatgagtggaactttaggaaggatgtgaacatggttctacagagttccctcggtaacgacctgcgggtagatggcgccagcatcagtttcacgagcatcaacctctatgctacttttttccccatggctcacaacaccgcttccacccttgaagccatgctgcggaatgacaccaatgatcagtcattcaacgactacctatctgcagctaacatgctctaccccattcctgccaatgcaaccaatattcccatttccattccttctcgcaactgggcggctttcagaggctggtcatttaccagactgaaaaccaaagaaactccctctttggggtctggatttgacccctactttgtctattctggttctattccctacctggatggtaccttctacctgaaccacacttttaagaaggtttccatcatgtttgactcttcagtgagctggcctggaaatgacaggttactatctcctaacgaatttgaaataaagcgcactgtggatggcgaaggctacaacgtagcccaatgcaacatgaccaaagactggttcttggtacagatgctcgccaactacaacatcggctatcagggcttctacattccagaaggatacaaagatcgcatgtattcatttttcagaaacttccagcccatgagcaggcaggtggttgatgaggtcaattacaaagacttcaaggccgtcgccataccctaccaacacaacaactctggctttgtgggttacatggctccgaccatgcgccaaggtcaaccctatcccgctaactatccctatccactcattggaacaactgccgtaaatagtgttacgcagaaaaagttcttgtgtgacagaaccatgtggcgcataccgttctcgagcaacttcatgtctatgggggcccttacagacttgggacagaatatgctctatgccaactcagctcatgctctggacatgacctttgaggtggatcccatggatgagcccaccctgctttatcttctcttcgaagttttcgacgtggtcagagtgcatcagccacaccgcggcatcatcgaggcagtctacctgcgtacaccgttctcggccggtaacgctaccacgtaa

SEQ ID NO: 44 - protein, 325 aa, Human mastadenovirus B
MTKRVRLSDSFNPVYPYEDESTSQHPFINPGFISPNGFTQSPNGVLTLKCLTPLTTTGGSLQLKVGGGLTVDDTNGFLKENISATTPLVKTGHSIGLPLGAGLGTNENKLCIKLGQGLTFNSNNICIDDNINTLWTGVNPTEANCQIMNSSESNDCKLILTLVKTGALVTAFVYVIGVSNNFNMLTTHRNINFTAELFFDSTGNLLTRLSSLKTPLNHKSGQNMATGAITNAKGFMPSTTAYPFNDNSREKENYIYGTCYYTASDRTAFPIDISVMLNRRAINDETSYCIRITWSWNTGDAPEVQTSATTLVTSPFTFYYIREDD

SEQ ID NO: 45 - protein, 91 aa, Human mastadenovirus B
NGVLTLKCLTPLTTTGGSLQLKVGGGLTVDDTNGFLKENISATTPLVKTGHSIGLPLGAGLGTNENKLCIKLGQGLTFNSNNICIDDNINT

SEQ ID NO: 46 - protein, 192 aa, Human mastadenovirus B
LWTGVNPTEANCQIMNSSESNDCKLILTLVKTGALVTAFVYVIGVSNNFNMLTTHRNINFTAELFFDSTGNLLTRLSSLKTPLNHKSGQNMATGAITNAKGFMPSTTAYPFNDNSREKENYIYGTCYYTASDRTAFPIDISVMLNRRAINDETSYCIRITWSWNTGDAPEVQTSATTLVTSPFTFYYIREDD

SEQ ID NO: 47 - protein, 561 aa, Human mastadenovirus B
MRRVVLGGAVVYPEGPPPSYESVMQQQQATAVMQSPLEAPFVPPRYLAPTEGRNSIRYSELAPQYDTTRLYLVDNKSADIASLNYQNDHSNFLTTVVQNNDFTPTEASTQTINFDERSRWGGQLKTIMHTNMPNVNEYMFSNKFKARVMVSRKPPDGAAVGDTYDHKQDILKYEWFEFTLPEGNFSVTMTIDLMNNAIIDNYLKVGRQNGVLESDIGVKFDTRNFKLGWDPETKLIMPGVYTYEAFHPDIVLLPGCGVDFTESRLSNLLGIRKKQPFQEGFKILYEDLEGGNIPALLDVDAYENSKKEQKAKIEAATAAAEAKANIVASDSTRVANAGEVRGDNFAPTPVPTAESLLADVSEGTDVKLTIQPVEKDSKNRSYNVLEDKINTAYRSWYLSYNYGDPEKGVRSWTLLTTSDVTCGAEQVYWSLPDMMKDPVTFRSTRQVSNYPVVGAELMPVFSKSFYNEQAVYSQQLRQSTSLTHVFNRFPENQILIRPPAPTITTVSENVPALTDHGTLPLRSSIRGVQRVTVTDARRRTCPYVYKALGIVAPRVLSSRTF

SEQ ID NO: 48 - protein, 948 aa, Human mastadenovirus B
MATPSMLPQWAYMHIAGQDASEYLSPGLVQFARATDTYFNLGNKFRNPTVAPTHDVTTDRSQRLMLRFVPVDREDNTYSYKVRYTLAVGDNRVLDMASTFFDIRGVLDRGPSFKPYSGTAYNSLAPKGAPNTSQWIAEGVKNTTGEEHVTEEETNTTTYTFGNAPVKAEAEITKEGLPVGLEVSDEESKPIYADKTYQPEPQLGDETWTDLDGKTEKYGGRALKPDTKMKPCYGSFAKPTNVKGGQAKQKTTEQPNQKVEYDIDMEFFDAASQKTNLSPKIVMYAENVNLETPDTHVVYKPGTEDTSSEANLGQQSMPNRPNYIGFRDNFIGLMYYNSTGNMGVLAGQASQLNAVVDLQDRNTELSYQLLLDSLGDRTRYFSMWNQAVDSYDPDVRVIENHGVEDELPNYCFPLDGIGVPTTSYKSIVPNGDNAPNWKEPEVNGTSEIGQGNLFAMEINLQANLWRSFLYSNVALYLPDSYKYTPSNVTLPENKNTYDYMNGRVVPPSLVDTYVNIGARWSLDAMDNVNPFNHHRNAGLRYRSMLLGNGRYVPFHIQVPQKFFAVKNLLLLPGSYTYEWNFRKDVNMVLQSSLGNDLRVDGASISFTSINLYATFFPMAHNTASTLEAMLRNDTNDQSFNDYLSAANMLYPIPANATNIPISIPSRNWAAFRGWSFTRLKTKETPSLGSGFDPYFVYSGSIPYLDGTFYLNHTFKKVSIMFDSSVSWPGNDRLLSPNEFEIKRTVDGEGYNVAQCNMTKDWFLVQMLANYNIGYQGFYIPEGYKDRMYSFFRNFQPMSRQVVDEVNYKDFKAVAIPYQHNNSGFVGYMAPTMRQGQPYPANYPYPLIGTTAVNSVTQKKFLCDRTMWRIPFSSNFMSMGALTDLGQNMLYANSAHALDMTFEVDPMDEPTLLYLLFEVFDVVRVHQPHRGIIEAVYLRTPFSAGNATT

SEQ ID NO: 49 - DNA, 137 bp, Unknown
  Description of Unknown: Human adenovirus 14 sequence
catcatcaataatataccttatagatggaatggtgccaatatgtaaatgaggtgattttaaaaagtgtgggctgtgtggtaattggctgtggggttaacggctaaaaggggcggcgcggccgtgggaaaatgacgtt

SEQ ID NO: 50 - DNA, 137 bp, Unknown
  Description of Unknown: Human adenovirus 14 sequence
aacctcattttcccacggccgcgccgccccttttagccgttaaccccacagccaattaccacacagcccacactttttaaaatcacctcatttacatattggcaccattccatctataaggtatattattgatgatg

SEQ ID NO: 51 - DNA, 342 bp, Unknown
  Description of Unknown: Human adenovirus 14 sequence
ttttgggggtggagtgtttttgcaagttgtcgcggtaaatgtgacgcaaacaaaggctttttttttacggaactacttagtgttcccacggtatttaacaggaaatgaggtagttttggccggatgcaagtaaaaattgttcattttcgcgcgaaaactgaatgaggaagtggttttctgaataatgcggtatttatggcagggtggagtatttgttcagggccaggtagactttgacccattacgtggaggtttcgattaccgcggaggtttcgattaccgtgttttttacctaaatttccgcgtaccgtgtgaaagtcttctgtttttacgtaggtgtca

SEQ ID NO: 52 - DNA, 3468 bp, Unknown
  Description of Unknown: Human adenovirus 14 sequence
gctgatcgctacggtatttatacctcagggtttgtgtcaagaggccactcttgagtgccagcgagaagagttttctcctctgcgccggcagtttaatattaaaaaaaatgagacacttgcgatttatgcctcaggaaataatttctgctgagactggaaacgaaatactggagtttgtggtgcacgccctgatgggagacgatccggagccacctgtgcagctttttgagcctcctacgcttcaggaactgtatgatttagaggtagagggatcggaggattctaatgaggaagctgtgaatggcttttttaccgattctatgcttttagctgctaatgaaggattagaattagatccgcctttggacactttcgatactccaggggtgattgtggaaagcggtacagctgtaagaaaattacctgatttgggttccgtggactgtgatttgcactgctatgaagacgggtttcctttgagtgatgaggaggaccatgaaaaggagcagtctatgcagactgcagcgggtgagggagtgaaggctgccattggttttcagttggattgcccggagcttcctggacatggctgtaagtcttgtgaatttcacaggaaaaatactggagtaaaggaactgttatgttcgctttgttatatgagagcgcactgccactttatttacagtaagtgtgtttaagttaaaatttaaaggaatatgctgtttttcacatgtatattgagtgggaaatttgtgcttcttattataggtcctgtgtctgatgctgatgagtcaccatctcctgattctactacctcacctcctgagattcaagcacctgttcctgtggacgtgcacaagcccattcctgtaaagcttaagcctggaaaacgtccagcagtggaaaaactcgaggacttgttacagggtggggacggacctttggacttgagtacacggaaacggccaagacaataagtgttccatatccgtgtttacttaaggtgacgtcaatatttgtgtgagagtgcaatgtaataaaaatatgttaactgtgtactggtttttattgctttttgggcggggactcaggtatataagtagaagcagacctgtgtggttagctcatagaagctggctttgattcatggaggtttgggccattttggaagaccttagaaagactaggcaactgttagagaacgcttcggacggagtctccggtttttggagattctggttcgctagtgaattagctagggtagtttttaggataaaacaggactataaagaagaatttgaaaagttgttggtagattgtccaggactttttgaagctcttaatttgggccatcaagttcactttaaagaaaaagttttatcagttttagacttttcgaccccaggtagaactgccgctgctgtggcttttcttacttttatattagataaatggatcccgcagactcatttcagcaggggatacgttttggatttcgtagccacagcattgtggagaacatggaaggttcgcaagatgaggacaatcttaggttactggccagtgcagcctttgggtgtagcgggaatcctgaggcatccaccggtcatgccagcggttctggaggaggaacagcaagaggacaacccgagagccggcctggaccctccagtggaggaggcggagtagctgacttgtctcctgaactgcaacgggtgcttactggatctacgtccactggacgggataggggcgttaaaagggagagggcatctagtggtactgatgctagatctgagttggctttaagtttaatgagtcgcagacgtcctgaaaccatttggtggcatgaggtccagaaagagggaagggatgaagtttctgtattgcaggagaaatattcactggaacaggtgaaaacatgttggttggagcctgaggatgattgggaggtggccattaaaaattatgccaagatagctttgaggcctgataaacagtataagattactagacggattaatatccggaatgcttgttacatatctggaaatggggctgaggtggtaatagatactccagacaagacagttattagatgctgcatgatggatatgtggcctggagtagtcggtatggaagcagtaacttttgtaaatgttaagtttaggggagatggttataatggaatagtgtttatggccaataccaaacttatattgcatggttgtagcttttttggttttaacaatacctgtgtagatgcctggggacaggttagtgtacggggatgtagtttctatgcgtgttggattgccacagctggcagaaccaagagtcaattgtctctgaagaaatgcatattccaaagatgtaacctgggcattcttaatgaaggcgaagcaagggtccgccactgcgcttctacagatactggatgttttattttaattaagggcaatgccagcgtaaagcataacatgatttgcggtgcttccgatgagaggccttatcaaatgctcacttgtgccggagggcattgtaacatgctggctactgtgcatattgtttctcatcaacgcaaaaaatggcctgtttttgatcacaatgtgttgaccaagtgtaccatgcatgcaggtgggcgtagaggaatgtttatgccttaccagtgtaacatgaatcatgtaaaagtgttgttggaaccagatgccttttccagaatgagtctaacaggaatgtttgacatgaacatgcaaatctggaagatcctgaggtatgatgatacaagatcgagggtgcgcgcatgcgaatgcggaggcaagcatgccaggttccagccggtgtgtgtagatgtgactgaagatctgagaccggatcatttggttattgcccgcactggagcagagttcggatccagtggagaagaaactgactaaggtgagtattgggaaaactttggggtgggattttcagatggacagattgagtaaaaatttgtttttctgtcttgcagctgtcatgagtggaaacgcttcttttaatgggggagtcttcagcccttatctgacagggcgtctcccatcctgggcaggagttcgtcagaatgttatgggatctactgtggatggaagacccgtccaacccgccaattcttcaacgctgacctatgctactttaagttcttcacctttggacgcagctgcagccgccgctgccgcctctgttgccgctaacactgtgcttggaatgggttactatggaagcatcctggctaattccacttcctctaataacccttctaccctgactcaggacaagttacttgtccttttggcccagctggaggctttgacccaacgtctgggtgaactttctcagcaggtggccgagttgcgagtacaaactgagtctgctgtcggcacggcaaagtctaaataaaaaaaaaaaattccagaatcaatgaataaa

SEQ ID NO: 53 - DNA, 19427 bp, Unknown
  Description of Unknown: Human adenovirus 14 sequence
atggccagccgcgaaggaaatcagttaagcgaccgccacagggagcacacccccgaacgcggaaggggttctgccagtcatccgccttccaggtcggaccgcagcccttcgcaatcgcctccacctctgcccccgaagagaaacacctgtcgccgtgtggggtcaggttcttctaccgacagtcagttggtaatggtgagcgaaacttcacaatcctccctgtctccggaacggagcgacagtcctcctcccccgataccccccaaaaagaagccaaggaagaccaaacatgttcccatgcaagacatcagtcaagacagcgaagaagaaagagaagaggcgcagcttgtagcagtaggtttcagctacccgcccgtgcgcatcgttgagaaggatggcaaaagaagcattgaaaagattgccaaagatgatcctctggctaaaggagctgctgcctgtactgttaagaatccgattagcttgcccctggtgtctgcttgggagaagggcatggaagtgatgtgtgtactgatggagaagtacaggctggataacgaacttagaacctcttttaaactaatgcctgagcagcacgaacaatacaagcgcatctgtcaccagtacgtaaacgaggagcaccgaggcatccagttaactttcactagtcacaagacactgagcacgatgatgggaagatttctgcagggaatgatacattctttttctcagatcgcccaccataattgggaatgtacaggctgtgcgttgtggcctcatggctgcaatgattatgagggcaagctgaagtgcctgcatggcactattatgattcagaaggagcagattatcgagatggatgtggccagcgagaatggacaacgagccttgaaggagaatcccgagcgaaccaaaatcacccaaaaccgctggggcagaagtgtggtgcaaatagccaacaatgacgcccgctgctgtgtgaatgatgccggctgcgcagctaaccagttttcgagcaggtcctgcgggatgttctataccgagggtagtaaagcccagcaggctttcaagcaatatgatgctttcatgagagccgtgtatccaggaatcagacaggatcaggccaagatgatactaatccccctgcactgcgattgcaaccacaagcctaattgggtgcccgccatgggtaggcagacctgcaagatgaccccgttcagcattgccaatgctgaagatctggatgtgggcatgattgcagatcccaccgtgctggcaagcgtgagacatccgtcgctgatggtgtttcagtgctgcaatccggtgtaccgcaactctcgcgctcagagcactggtcctaattgtgatttcaagatttcggctcctgacctgctgggagctttgcagctgaccagaaagctgtggagtgacatcctacccgatataccggttcccaagttggtgattcccgaattcaagtggcaacccaagtatcagttccgcaacgtatcactgcccgcgggtcattctgattctcgtcagaacccattcgacttgtaaataaataagtaatccagagccttgatacgtgtaaaaaataaagtgctgtttattcaacacgttgtttacatgagtcattattgcacatccatacggtcgaacgcagtggccctttcgatgtgtgtacgatgggagcgaaaataaggcgaatgggtattgagaaaatggtagagtgctttttgattgtcacacagggtgggctggactttaggagaatgaagcatgttgtttggcactccagtcagcaatttcatggtggggtttccgtccatgggacggtcaggccagtgcacaaaggcatgaaggaacatgcagcagaaaagtccgcaggcggcagaacgggggccctgcacggtctgggtagatttttccagcgtaatacagcggtccttggtagcaagagcgctgcggcgcaggagaccctcatattcaaactggtaaatctgtttaagacgatcatccgagaatccaaaaggatcaaaaaggtagcaggtgttagaacgtgggttccaaccgaaagccaaccagtgctctccccccgtctcacgtccggccgtgtttacaatggcacaggcgagcttatcgggggccatgaaccccgggaagcgcttatcgtaggttcccaaaaaatagggtccgcaacccaggtcttggacaatggctctgagctcttgctcgctggagccgttttgggatccgcaggccatggttgcagctgctgtttgcaagaagcaagaagctttttacgtggtagcgttaccggccgagaacggtgtacgcaggtagactgtctcgatgatgccgcgatgtggctgatgcactctgaccacgtcgaaaacttcgaagagaagataaagcagggtgggctcatccatgggatccacctcaaaggtcatgtccagagcatgagctgagttggcataaagcatgttctgtcccaagtctgtaagggcccccatagacatgaagttgctcgagaacggtatgcgccacatggttctgtcacacaagaactttttctgcgtaacactatttacggcagttgttccaatgagtggatagggatagttagcgggatagggttgaccttggcgcatggtcggagccatgtaacccacaaagccagagttgttgtgttggtagggtatggcgacggccttgaagtctttgtaattgacctcatcaaccacctgcctgctcatgggctggaagtttctgaaaaatgaatacatgcgatctttgtatccttctggaatgtagaagccctgatagcctatgttgtagttggcgagcatctgtaccaagaaccagtctttggtcatgttgcattgggctacattgtagccttcgccatccacagtgcgctttatttcaaattcgttgggagatagtaacctgtcatttccaggccagctcactgaagagtcaaacatgatggaaaccttcttaaaagtgtggttcaggtagaaggtaccatccaggtagggaatagaaccagaatagacaaagtaggggtcaaatccagaccccaaagagggagtttctttggttttgagtctggtaaatgaccagcctctgaaagccgcccagttgcgagaaggaatggaaatgggaatattggttgcattggcaggaatgggatagagcatgttagctgcagatagatagtcgttgaatgactgatcattggtgtcattccgcagcatggcttcaagggtggaagcggtgttgtgagccatggggaaaaaggtagcatagaggttgatgctcgtgaaactgatgctggcgccatctacccgtaggtcgttaccgagggaactctgtagcaccatgttcacatccttcctgaagttccactcataagtgtaggagcctgggagaagcagcaggtttttgacagcgaagaatttttgaggcacttgtatgtggaaaggcacataacgtccgttacccaaaagcatggatcggtaacgcaagccagcgttacggtggtggttgaatgggttgacattgtccatagcatccagagaccacctggcgccaatgttcacataggtgtctactagagatggcggcaccacccgcccgttcatgtagtcgtaggtgtttttgttttctggaagagtgacattggacggggtgtatttgtacgagtctgggagatacagagccacattggaataaaggaaacttcgccatagattggcttgaaggttaatttccatggcaaatggatttcccttaacaagttcactgataccatttggatttacatctttccaagcttggtctccatttaactgaatctccttgtaactatctgttcgcggaccgatgccgtccagtggaaaacagtagttgggaagttcatcttccacaccatgattttcaataacacgcacatcgggatcataactgtcaacagcctgattccacatgctaaagtatctggttctatcgcccagggagtcaagcaagagttggtaagacagttctgtgtttctgtcctgcaagtcaaccactgcattcaactgagatgcttggccagccagcacccccatgttaccagtactgttatagtacataagaccaataaaattatctctgaagccaatgtagttgggtctgttgggcatagactgctgtccaagattagcatttgaactagcatctgaaacttcaggtttgtacacaacatgagtatctggagattccaggtccacattttctgcatacattacaatcttaggtttaagaccttgtttttgtgatcttaagtcaaaaaagttcatgtcaatgtcatattcaatgttgttgccttcttctgttttcacttttgcctgtccgcctttcacattagtaggtttagcaaaagacccatagcacggtttcattttagtgtccggtttaagtactctgcctccgtatttttcttcagtgccatctgtatcagtccacgattcctgtcccacctggggttctggttggtaaagcttattagcgtagataggtttagggtcaccttcagctgggacttccaaacctattggtagtccgtcttttgtaatgtcagcatcggcttttactggggcattgccaaaagtgtatgtagctttttcgtcattttccccgtcttcattttgccgttcttcagtagtttcaacccctttatccaaccactgagatgcatttggagcgcctttaggagccagagagttgtaagccgtaccagaatagggtttgaaactgggacctctgtccaacacgcccctaatgtcaaagaacgtgctggccatatccagcactctgttgtcgcccacggccagggtgtaccgcactttgtaagagtatgtattgtcctcccggtcaacgggcacgaagcgcaacatgagccgctggctacggtcggtggtcacatcgtgggttggcgctacggtgggatttctaaacttatttcccagattgaagtaggtgtctgtggcgcgggcgaactgcaccagacccggactcaggtactccgaagcatcctgtccggcgatgtgcatgtatgcccactggggcagcatcgatggggtggccatcttgaaagtaactcagcgtcgacgcacgacctcttccttttttcctctgctgctgtgacggcgtgtaatgacacatatacacagataggcaagttaagcgctactccatatttaattaaaagcagcgacggcgttttacactttgcacgcctagacccacgatgctgttcagagtattttgccagtgcgcatttggacgaggagcgcccccgggacgtgacctggctacggcgactggtttcggggcagcgacaggcttagaagcgggtacagcagtagcagcagggggagggggcaaatccaaagtgacgggtcgatgcaactgagaaggtttcattaccccggtagccataggggctatcggtctagtggtgggcattccaagcttcgttgcttcctcataagaaggcggttcatctacgcgcgtcaccagcgtctcttccaaatcgggacgcggacgcttgtcgcctcgtttttctggcggaggaatttcttcctccacttgtatttcacctggggttgctggcggcgggtccaaacgactgtttatctttttctgcacagcctgattagccaaatctaccactccattgatgccggaagctatcccatcgactactttttgttgaaagttctggtctttaagtttatttctaagcgcctgtcctgtactgctgttccaagctttgttcccgtatgtttttatggttgagccaaaatttttaagcccgctccagatactgctccaattgaaggcgcccccgttcagttggctcgtgccgatgtcgctccaggtgcccatgtacggcttcgtgccgtgtcgcggagccaaggatgaaaaattgatgttttccatctctaagaaaacatagtcacaggaccaggagtgtcagagtccattgtatttttttttttatttatacttttttttccaatgtcaatgtcgttgcgaggcctgaaccgccacggaagctatgcctggtatcgcgccaattgcagcagcgataattggaattaaggctggcaaaaaaccaccccgcaattgcttgcggatagcacgccgtcgcctgtagcgtcgcattccgcgccccaacatccctcttctacggcgcgaatttcttcctcggtaaccagtgatgggaacgcgaaggcgacaagtgagggccatatctgcaaggaggcagcggcaacattgattaagtgatgatacttggatggtaacgcgcacgcggcagtgtcaaaggttccgcactactattgcggtacacttgccgcaccagggcgccgggagtcggtttgcttgtgcgtctacggcgacgactgcgatttgcaggtgtcttgcggcgacggcgggaggtactgtttcggctgcgatagtagcgagtgcctcggtaaccaggagtaggaataatagatgggtgtacaacatagttgggcatcaacagacttgctggaccgtactttcgtcgggatcttcgagtgggaccggcggcgtcagttgtaataggcatcggcatccatggatccgtttgcacttcagtggaggtggcagtaggctttgcgggttcagtttgcacttccatactttcagtgggaatcttaatgtctacagtttgtactcccagaccaggcgctacctgcttaatgggtctcactttaacctcaggttgaatatctggatccacttttactttctccaaaacgtcctccaacttttggcgtttgggtaccattagttgcatagtgggatacaaatcttcaccttcgcgtttaacacctgttcgcggagttacgggtaacacttgctgcaaagtgaccggtttaagactaggggtgggatttccatgatccaagggtatggacactgtctcatccttgggatttattctactacgcttgccataagcaaactcgcctaatcggtcagccgcctgctcaagaatatcatcatccccgtacacctcatcataggaacgcttaaaagtagcgcttgaacgctcgccgggtgtaaagaccaccgaagttccaggtctcaacaaatgtcgaactttgcgtccacgccattgcacgcgtcgccgtggggcaaactcgcgcacaaactccgccagcccatcatcgccatcttcctcttcttttttgtcctttttagcccgcttgattttgcggggttttttttcatccttcagcggttggccgtagacttcaggtgcgataacctgcagcatttcttccttgtatttgcgcttggacatcctcgccgctgggacacaacatcggagactgctcagtatcttctaagtgcgagggggacgggtgcgcacgggtacacgttgaccggtggcagcgtcacgcacccagtatacattgcctcttcgcgtttgggccatgtcggcaatagtcgccgctgcgacagcggctgcttgcctgcgggacctgccggcgctggcgcccgaagctgcacgtctggccgccctaagcatggctcttcgtcccacgcgtctagctcttcgtagcagagctcttgcggctcgcatggcagtggtagctcggtggcgtctggcaatgcgccttcgccggctcttacgtcgagcatagttgcgagcgtcagccactacactgtcaataactgcatccacagtagatgtaggcgcagtaggagtataattacgggcgtcggcaaccacctcatcgattacatcatcgacggtggttcgaacgcgagtgcggcccttgagggcaccccatggagcgcgaaaatgaccgcgaacacgcacgggatgttgggtagaacgtttgcgtgcgcctccgtacatcttgcttggagcgcgcagaccccaaccggtgttattactgggcgagataagaatggacatttttttagaaagtgcggcttgaaaggacgcgcggtgcgactatgcccagtgccttgtacacgtagggacaggtgcggcgtctggcgtcagtaacggtcacacgttggactccccggatactgctgcgcaacggcagggtcccgtgatctgtgagagcaggaacgttttcactgacggtggtaatggtgggcgccggcggacggattaaaatctggttctcaggaaagcggttgaagacgtgcgtaagcgaggtggactggcggagctgctgggagtacacagcttgttcgttgtagaagctctttgagaagacgggcataagctctgcacccaccacagggtagttgctgacttgtctagtggagcggaaagtgacaggatcctgcatcatgtctggaagcgaccagtagacctgctctgctccgcaggtgacatctgaggtggtgagcaatgtccaggaacgcactcctttttcgggatcgccataattgtacgaaaggtaccaactgcgataggctgtgttgattttatcttccaacacattatagcttctattcttactatctttttctacaggttgaatagtgagtttcacgtccgttcctccagttacatcggccaataatgattctgcagtcggaacaggtgttggtgcaaaattgtctcctctgacctctccagcgttagcaacccttgtaaagtcgctggcaactatgtttgccttagcttccgcagcagcttctattttggctttttgttctttcttactgttctcataggcatctacatccaagagggccggaatattacctccttctaaatcttcatacaaaatcttaaaaccctcttgaaatggctgtttttttctgataccaagaaggttgctcaaacgactttcggtaaagtccactccacagccaggcagtaagacaatgtcaggatgaaaggcttcatacgtatacactccaggcataatcaacttggtttcgggatcccatcccagcttgaagttcctggtgtcgaacttaacaccaatgtcactttcaagcactccattctgtctgcccactttcaagtagttatctatgatggcattgttcatcaaatcaatggtcatagtaactgaaaagttgccttctggcaaagtaaactcgaaccactcatattccaaaatatcctgcttgtgatcatatgtatccccaactgcagcaccttcgggaggttttctggacaccatcacacgcgctttgaagttgttactaaacatatactcgtttacgttgggcatgttagtatgcatgatggtctttagctgaccgccccaccgcgatcgttcatcaaagttaatggtctgggtactggcttccgtaggggtaaagtcattgttctgcaccaccgtggtcaagaagttgctgtggtcattctgatagttcagagaagcaatgtccgccgacttgttgtccaccagatacaacctggtggtatcgtactgaggtgccagttccgagtaacgaatgctgtttctgccctccgtaggtgccaggtatcgcggaggtacaaagggagcctccagtggggattgcatcaccgccgtcgcctgctgctgctgcatcacgctctcgtacgaaggaggaggaccctccggatacaccaccgctccgcctagcacgactcgcctcattatactagacacaaataataaagaagaacgaacgtacgctcgtcgccatggccttggtgagttttcctttttattttttttttacaacataccacccaagcgagggcgcaaatgagcaaacgggttgccccttcctctcccacccaagtccaacacgctgctatcatcggccgaatcctcatcttcccacacaagacccctctgtctgtcatgacgctggcgtctacggctcgctctacttgtagtccccatgatcccaggctcgtctctgtgatcctgagcataagtcttccatctactcatcttatccaccaaactttctattccattgtttgggaaatttttttctctcgccggtctgagcaaggaatcgtttaggtattcctcttcgcccattaaactcgggcgacttattctacccacttcgctgctacgtacactgtgtagagaaaagggtagactaggaaaaggacttgcagactcgggctcagccgcggtagcacccatgaccccggacagcgatgcagaagaatgcattctatcgccgccttcctttttccacgtgcgatgatcaaaaagaggtgaaaaaacattactgtccacgtcgtcccacagaaacccgtcattagggtcgggcatgtcatattcgcccgtgtagaaaccaggtgggggcagccagtgcgggtttaggatggcattggtaaaataatcagagttcatagcggcagctctgtgcaagtagtccagcagtttgttaatgaaaggccggttactggcatacatgctgggctccatatttcgcgctgtcatgtccaatgccgcagtcggagttgccccctcttgcatcagaaacaatcccacgctctgctgcacatatctaaggatcctctcctcctccgcagtaagagcatattgaggagggatcttctgagaccgattggtaagcaagaagttcagagtggcttccaaactgccagtgtcttcctgacccaaagcgcgactgacttgggtaatttcttgataggtctgctcgtccacctggctttgccctatggcttcgcgatacaggtttagtaggtaacccaaataggaattacggtcgatgctgccgctgtcggtgaaaggagctaccaacagtagtaataggcgggagtttggagttaacaagctagacacggttgctctttctcctaccggggcatgcactccccacaaacctttaaggtttttaaaagcttggctcagatttaccgtctgcaaaccctgtctgctagtctgaaagaagtagtcaggtccggactgatacacttcgctctgaggtacttcagataccatcagtctcaacgcactcaaaaagttagtataatcctgttgaccacgcggcacattagcaggctgagtactcaaaaaagcatttaacgccaccagcgaaccaaggttggcatcgcgctggaacctttcacgctgagacacggcttcgcgtacatctgttatcatacggtccaaattggtttgcacattgctactgttgtagcgagccacgcgttctaaaagagcgttgtataccagtccggcctcatctggacgaatagctttgttctccaccaacgcgtttacaatggccaggaccttctcatgagtgggattagagcgggaaggcactacagcttccatgatggccgatagacggttggcctggggttgctgtctaaaggcttcggggttgcgagtcgtcaacgccatgatacgttgcatggcctgggtccaatcgtccgaggagttaatgccggacggctggctctgcagcgccgcccgcgttgcgggatccggtgcttgctgttccatctagcaaaaaacacgggttgtgccatcagtcttccaagtactcgccctcttcctcctcgccttcatccgcctcttctatgtaaggaagctcacatcctgccgtcgcggcgctcagagccctgcgactaggctgccactgcaagtcagctcccatgtcaaagtaattctcaccctctgttccagctccagtcagagctctttgcaaactgtgcatcagttccctgtcgcttaactcgcgcctcctactggcgctaacggcgcgatgcattctgtcattgcggtacaccccaagatcatcgctcagggtcaagaccttgagcgtcatacgcatgtagaacccatctatcttcacctccttgtctatgggaacgtatggagtcttgtagatcttgcgagcgtaatattttcccaaacttaaaaccgagtaattgatggcagccaccttttcggccaggcccaggctccgctcctgcactatgatactctgtagaatgttgataagatcatacaaccatctcccctcgggttcagtgatgttgagcagtgcctctctgaaagcctcgttgtctctgctgtgttgcaccaccagaaacagctgtgcggtcagaggtttgctagtagggttctgaatgatagcttccatcaaatcccacaaatgcatcaaaccaagagtaacttcttcgcgggcaatcagggttcgcacatgattattaaaagacttttggaagttacgctcttcctttactgtctgctcgtaagccgatacaaggttggctgcagccacgtgtgccctggcaggactgatccctgtcacttcatcaacttcgaaatcctcgtcccgcaacactcgtcttcggtccaaaccgtgacgcagctcacgacccgcgttaaagcgggaagctcgcatctcctccggctcctcgccgcttctgtctctaaataggttctgttggggcacatacgcctcgcgagaatcttttttcagttgaactcgcggatgccgctcgggcgagggcgcacctagacgtgccagtccttcgccctcttccaagtccagatcataggcgggctgtcccgcaccgctcacggcggcagttgcagtagttgcagggacagccttttgtggttgctgctgctgcgaggggggctgttgttggggacgcatctgtcgcagcacgggatgcatctgagcggcaaaaaaaaaaataggactcacttccctgccattcagcaaccagcaaaacgactcgattccgtatcctggatttttgtaggctgggtcgagacgggagtgccaataccacgttagccgcggctccggccggctcgagtacaagtcttgaaccggggtacaccgcgacccaacccgttcacgttcctccaggctacagagtcgagtcgctgaacgctttcattttcttcgtgtctatagagcatcaatgactgcgcgcgcctcactggtcaaaccgtgcctacaatgaactacttcatgccgctacgcaacatttggaaccgcgtacgcgagtttcctcgggcttccactaccgccgcaggaatcacctggatgtccaggtacatctacggctatcaccgccttatgttggaagacctcgcccccggcgctccagctacagaacaatggcctctctaccgccaaccaccaccgcattttcttatagggtaccagtatctggtgcgcacctgcaacgattacatttttgacacccgcgcctattcgcgccttaaatacaccgagctcgtgcgccatggtcaccaaacagttaactggtcagtcatggccaactgtgcttacaccatcaataccggggcttaccaccgcttcgtggattttgatgactttcaagccaccctcacccaagtacagcaagccatcctcgccgaaagagttgtagctgacttggcactggtccaaccaatgcgcgggtttggactcacacgtatgcatggcagaacgggtgaagaagaagtgcccgtagaacggctcatgcaagactactacaaagatctggctagatgtcaggataatgcttggggaatggccaatcgcctgcgtatccagcaagccggacccaaagacctggtgctcctcgccaccatccgccgtcttagaactgcctactttaatttcatcaccagcagcatcgtctcaccttcccgagatgaagaaggaatagaagacccagaccgaacacataaccacccccgcccacaagaagccgtactcagcctaccttgtgactgtgactggttagacgctttcgttgaaaggttttcagatcccgtggatcttgacacgattagatctctgcgcgcagtccctacgggccaattaataaaatgtataatcagcgccctttccctcccaaacggagaacctcccagtcaccactttaaggagatgcgcggcggtgtttttactctgcgaccgcgcgagaacggccgcgccgtcactgaaaccatgcgccgccgccgcggagaggtcattgaacgattcatcgaccgtttgcccgtgcgccgtcgacgtcgccgcgtgccccctccgcccccgcctgaagacgaagaagagatgttagtggaagaagagatagaagaggaagaagagatgccgggagccttcgaacgcgaagtacgggccaccatagccgaactcatccgtcttctcgaggaggaattgaccgtgtccgcgcgaaactcccagttttttaattttgccgtggacttctacgaggccatggagcgcttggaagctctgggcgatgtcagcgaaatgccgctgagacgatggatcatgtatttctttgtcgccgaacacatcgccaccacactcaactacctttttcagcgcctatgcaactatgcggtcttcaccagacacgtggagcttaacctcgctcaggtggtgatgcgcgcaagagactccgagggggccgtggtttacagccgcgtctggaacgaggcgggcatgaatgcattctcccaactcatgggccgtatctccaatgacctcgcggccaccgtcgagagagcgggtcgcggagatcttcaggaggaagaaatcgagcagttcatggcggagatcgcctaccaggacaactctggtgacgtacaagaaatactgagacaagctgccgttaacgataccgaaattgattctgttgaactctctttcaggttcaagctcacggggccggtagctttcacccaaagacgtcagatacaagacgtcaatcgacgcgtggtggcgcacgcaagtcttctcagagcgcagtaccagaacctgcccgtgcgcggcgccgacgtgccactaccagccatgcccccgggtccggaacaaccgctgccgcccggcgcgcgtccccgtcaccgcttttaagcatgcaagaagcaagagagccaccaccgatcaaaagaaaaaacaaaggtacggtagtggcacccaaaggacacggaaccctgcaagccattgacgtctctacaaacgaacctgtggaaatcaagtaccatctaaacctcccgcacgccctggaaaagatcatgcaagttaatcttctgtccctacctactaacctgagtccgcagcgtctcaggactctggacagctccagcctgcgcgctctcgtccttcagctccgcccctcccgcgccgaggtctggacttgcctcccgcgggggctcgtcagcatgaccaccatcgaaacagaagatgaacaggccaatacagcgaatatagaagagcacgagatacaatcgccaggcctcggcttcccactgaaatttctcgtcaagggaagccaggtacagctcattcacgagatacaacccgtgcaacgctgcgactactgcggccgtctgtacaagcacaaacacgaatgctcggcgcgccgcagaaacttctacttccatcacatcaacagccaatcctccaactggtggcaggaaatccagtttttcccaatcggctctcatcctcgcacagaaagactcttcctgacctacgatgtggaaacttacacctggatggggtcctttggcaaacaactagttcctttcatgctggtcatgaaactctcaggagaagagcgtctcgtcaacatggcccacgatctagccattaaacttaagtgggatcgatggcaacaagatcccggaaccttctactgtgtcactccagaaaaaatggcaattggccagcattttcgtcagtatcgggaccagttacaaacagcactggcggtggatctttggtcatcattcctacatgcaaatcctcatctgcacgaatgggcccttgaacactacgccttatctgaccctacagacctaacctttgatgagctcaataagctacctcacgtcagaggcacgccgcgtttcatagaattatacattgtaggacacaacatcaacggcttcgacgagatcgtcctagctgcccaggtgatcaacaatcgagcggaagtaccacagccttttcgcatcactcgcaattttatgcccagagccggtaagattctcttcaacgatgttactttcgctttgcccaaccccgcctacaagaaacgggtagacttccaactctgggaacagggagcctgtgacgacatggactttaaataccaatttgtcaaagtcatggttagagacaccttcgcccttactcacgcttcgctacgaaaagctgctcaagcatactctctacccgtagagaagggctgctgcccttacaaggcagttaatcagttctacatgctaggatcttaccgtgcagacaaagacgggtttccgctagaagagtactggaaggatcgcgaagaataccttctcaaccgcgaactgtgggaaaagaaaaaccaaccaggttatgacatcattcaagaaacacttgactactgcgccctggacgtacttgtcaccgcccaactggtaaccaagcttgaagaatcttatgcccactttatcagagactctgtaggtctacctcatgcccacttcaacatttttcaaagacccaccatctcttccaattctcacgccatctttcgccagattgtctacagaacagaaaaacccaatcgcaccaacttgggtccggggctgctagcgccgtcacatgaactatatgactatgtgcgagcaagtatcagaggggggcgatgctatccaacctacataggcatctttgaggatcccatctacgtctatgacatctgtggcatgtatgcctctgcactcacccatcccatgccctggggcagtccccttaacccatatgagcgcgcactggcagctcgagaatggcaaatggccttagatgaccccactcccatcagctattttgataaggatttacttcctggaatctttaccatggatgcagaccctcccgatgaacttatgctagacccacttccacctttctgttctaggaaaggaggtaggctctgctggaccaacgaaccccttcgaggcgaggtggccaccagtgtggatttaattaccttgcataaccgagggtggcaagtgagaattgtgccagatgaattgacaactatcttccccgaatggaagtgcctggcacgcgaatatgtccaactcaacatcgctgccaaagagcgcgcggacaaggaaaagaaccaaaccatgcgatccattgccaaacttttatccaacgccctgtatggatcatttgccaccaaacttgacaataaaaaaattgtgttttctgaccaaatggacgaaaacctcatgaaaggcatctcaagcggcactgtcaatatcaaatcctcctcgttcttagaaactgacaacctgagtgcagaggtcatgcccgccttcgagagggaatacctaccccaacagctgacgttcctggacagcgatccggaagacagtgaggaagagcagagaaccgcccccttttatacccccccagctgggaccccaggtcacgtgaaatacacctacaagccaatcacattcctggatgttgaagagagtgacatgtgtttgcatactttggaaaaggtggaccccctggttgacaacgatcgctacccctcccacatagcctcctttgtgctggcctggacgcgcgcctttgtatcagagtggtcagagttcctatacgaagaagaccgaggcactccactggaaaagaggcctgtaaaatcagtctacggggacacggacagcctgtttgtcactcaacgaggacacgaactcatggagaccaaaggtaagaaacgcatcaaaaaatatggcggaaaacttgtttttgaccccaatgaaccggatttaacctggctggtggaatgtgaaactgtttgcgcctcctgcggcgcggatgcatactccccagaatccattttccttgcgcccaagctgtatgcgctgaaatgcctatactgcccggtatgcaagaaaacttccaaaggtaagctccgcgccaagggccacgcagccgaggcgctcaactacgaactcatggtaaactgctacttggccgacatacagggcgccaagcggcacaagttttcgaccagcaggatgagtctgaagcgcaccctggcaagcgcccaagcaggcgcacaccccttcactgtgacggaaacaaccctgacccgaactttgagaccctggaaggaccgaaccctggcagcgctggacgcccatcgtctcataccctactccaggagccgtccaaacccgcgaaacgaggaggtctgctggatcgagatgccatagaacacatcactgaactgtggaacagactagaacttttgcaacagactctctccaaaatgcccatggctgacggtctaaaaccgctgaaaaacttttcctcactacaagaacttctatcactaggaggagagcgcctcctaatggatttggtgcgggaaaatatgcatgtaagggaaatgatgaacgaggtggcccccttgcttcgagaagacggcagttgccgttccctaaactaccaactgcaacctgtaatcggaatcatttatggccccaccggatgtggcaaatctcaattgctcagaaacttgctatcatcccaactaattaccccagccccagaaacggtgttctttatagccccccaggtggacatgattccaccctcggaactgaaagcttgggaaatgcaaatctgtgaggggaactatgctccggggcccgaaggaacattcataccccaatcgggtactctccgtcccaaatttattaaaatggcctatgatgatttaactcaggaacataactatgatgtgtcagacccacggaacgtgtttgcccgcgctgctgcccacggccctattgctattatcatggatgagtgcatggaaaatctcggaggacacaagggtgtctccaaatttttccacgcttttccatccaagctgcacgataaatttcctaaatgtaccggatacaccgtcttggtggtacttcataacatgaacccaagacgagatcttggcggcaatattgccaacttaaaaatccaatccaaaatgcacataatttcaccccgaatgcacccctcccagctcaaccggtttgtaaacacctacaccaagggcttatctgtggcaatcagcctacttctaaaagatattgtgcaacaccatgcacagcgaccttgttatgactgggtaatttacaacactaccccggagcatgaatcccttcaatggagctatctccaccccaaagacggcctaatgcccatgtatctaaacattcaatcccacctttataggattttggaaaaaatccaccgtgttctcaatgatcgagatcggtggtctagggcataccgtgcgcgaaaaatgaaataaaaaacacttgattttaaatcaa

SEQ ID NO: 54 - DNA, 3748 bp, Unknown
  Description of Unknown: Human adenovirus 14 sequence
tataaaacgcctgatgattagaggccgaggtattcagcttaacgacgagtcggtgagctctccgcttggtctacgaccagacggaatctttcaaattgccggctgcgggagatcttccttcacccctcgtcagactgttttgactttggaaagttcgtcttcgcaaccccgctcgggcggaatcgggaccgttcaatttgtggaggagtttactccctctgtctacttcaaccctttctccggatctcctgggcactacccggacgagttcataccgaactttgacgcaattagcgagtcagtggacggctacgattgatgtctggtgacgcggctgagctatctcggctgcgacatctagaccactgccgccgctttcgctgttttgcccgggaactcattgagttcatttacttcgaactccccaaggatcaccctcaaggtccggcccacggagtgcggattactatcgaaggtaaaataaactctcgcctgcatcgaattttctcccagcggcccgtgctgatcgagcgagaccagggaaacaccacggtttctatctactgcatttgtaatcacccaggattgcatgaaagcctttgctgtcttatgtgtactgagtttaataaaaactgaattaagactctcctacggactgccgcttcttcaacccggattttacaaccagaagaacgaaacttttcctctcatccaggactctgttaactttacctttcctacttacaaaccagaagctcaacgacaacaccgcttttccagaagcattttccctactaatactactttcaaaaccggaggtgagctccacagtctccccgcagaaaacccttgggtggaagcgggccttgtagtgctaggaattcttgcgggcgggcttgtgattattctttgctacctatacacaccttgcttcactttcctagtggtgttgtggtattggtttaaaaaatggggcccatactagtcttgcttgttttactttcgcttttgggaccgggttctgccaactacaatccatgtctagactttgacccagaaaactgcacacttacttttgcacccgacacaagccgcatctgtggagttcttattaagtgcggatgggaatgcaggtccgttgaaattacacacaataacaaaacctggaacaataccttatccaccacatgggagccaggagttcccgagtggtacactgtctctgtccgaggtcctgacggttccatccgcattagtaacaacacttttattttttctacaatgtgcgatctggccatgttcatgagcaaacagtattctctatggcctcccagcaaggacaacattgtaacgttctccattgcttattgcttgtgcgcttgccttcttactgctttactgtgcgtatgcatacacctgcttgtaaccactcgtatcaaaaacgccaataacaaagaaaaaatgccttaacctctttctgtttacagacatggcttttcttacagctctcatacttgtcagcattgtcactgccgctcacggacaaacagtcgtctctatccctctaggtcataattacactctcataggacccccaatcacttcagaggtcatctggaccaaactgggaagcgttgattactttgatataatctgtaacaaaacaaaaccaataatagtaacctgcaacatacaaaatcttacattaattaatgttagcaaagtttacagcggttactattatggttatgacagatacagtagtcaatatagaaattacttggttcgtgttacccagtccaaaaccacgaaaatgccaaatatggcagaaattcgatccgatgacaattctctagaaacttttacatcttccaccacacctgacgaaaaaaatatcccagattcaatgattgcaattatcgcagcggtggcagtggtgatggcactaacagtaatatgcatgcttttatatgcttgtcgctacaaaaagtttcatcctaaaaaacaagatctcctactaaggcttaacatttaatttctttttacacagccatggtttccactaccacattccttatgcttactagtatagcaactctgacttctgctcgctcacacctcactgtaactataggctcaaactgcacactaaaaggacctcaaggtggtcatgtcttttggtggagaatatatgacaatggatggtttacaaaaccatgtgaccaacctggtagatttttctgcaacggcagagacctaaccattatcaacgtgacagcaaatgacaaaggcttctattatggaaccgactataaaagtagtttagattataacattattgtactgccatccaccactccagcgccccgcaaaactactttctctagcagcagtgccgctaacaatacaatttccaatccaacctttaccgcgcttttaaaacgcactgtgaataattctacaacaatttccacttcaacaatcagcatcatcgctgccgtgacaattggaatatctattcttgtttttaccataacctactacacctgctgctataaaaaagacgaacataaaggtgatccattacttagatttgatatttaatttgttctttttttttttatttacagtatggtgaacaccaatcatggtacctagaaatttcttcttcaccatactcatctgtgcttttaatgtttgcgctactttcacagcagtagccacagcaagcccagactgtataggagcatttgcttcctatgcactttttgcttttgtcacttgcatctgcgtatgtagcatagtctgcctggttattaattttttccaacttctagactggatccttgtgcgaattgcctacctgcgccaccatcccgaataccgcaaccaaaatatcgcggcacttcttagacttatctaaaaccatgcaggctatactaccaatatttttgcttctattgcttccctacgctgtctcaaccccagctacctatagtactccaccagaacaccttagaaaatgcaaattccaacaaccgtggtcatttcttgcttgctatcgagaaaaatctgaaattcccccaactttaataatgattgctggaataattaatgtaatctgttgcaccataatttcatttctgatataccccctatttgattttggctggaatgctcccaatgcacatgattattcccaagacccagaggaacacattcccctacataacatgcaacaaccaatagcgctaatagaatacgaaagtgaaccacaacccccactactccctgctattagttacttcaacctaaccggcggagatgactgaaacactcaccacctccaattccgccgaggatctgcttgatatggacggccgcgtctcagaacagcgactcgcccaactacgcatccgccagcagcaggaacgcgtggccaaagagctcagagatgtcatccaaattcaccaatgcaaaaaaggcatattctgtttggtaaaacaagccaaaatatcctacgagatcaccgctaccgaccatcgcctctcttacgagcttggcccccaacgacaaaaatttacctgcatggtgggaatcaaccccatagttatcacccaacaaagtggagatactaagggttgcattcactgctcctgcgattccatcgagtgcacctacaccctgctgaagaccctatgcggactaagagacctgctacccatgaattaaaaaaatgattaataaa

SEQ ID NO: 55 - DNA, 978 bp, Unknown
  Description of Unknown: Human adenovirus 14 sequence
atgaccaagagagtccggctcagtgactccttcaaccctgtctacccctatgaagatgaaagcacctcccaacacccctttataaacccagggtttatttccccaaatggcttcacccaaagcccagacggagttcttactttaaaatgtttaaccccgctaacaaccacaggcgggtctctacagctaaaagtgggagggggacttacagtagatgacactgatgggaccttacaagaaaacataggtgccaccacaccacttgttaagactgggcactctataggtttatccctaggagccggattgggaacagatgaaaataaactttgtaccaaattgggagaaggacttacattcaattcaaacaacatttgcattgatgacaatattaacaccctgtggacaggagttaaccccaccgaagccaactgtcaaatgatggactccagtgaatctaatgattgcaaattaattctaacactagttaaaactggagccctagtcactgcatttgtttatgttataggagtatctaacaattttaatatgctaactacatacagaaatataaattttactgcggagctgttttttgattctgcgggtaatttactaactagcctgtcatccctaaaaactccacttaatcataaatcaggacaaaacatggctactggtgccattactaatgctaaaagtttcatgcccagcacaactgcttatcctttcaataataattctagagaaaaagaaaactacatttacggaacttgtcactacacagctagtgatcacactgcttttcccattgacatatctgtcatgcttaaccaaagagcaataagagctgatacatcatattgtattcgtataacttggtcctggaacacaggagatgccccagaggggcaaacctctgctacaaccctagttacctccccatttaccttttactacatcagagaagacgactga

SEQ ID NO: 56 - DNA, 273 bp, Unknown
  Description of Unknown: Human adenovirus 14 sequence
gacggagttcttactttaaaatgtttaaccccgctaacaaccacaggcgggtctctacagctaaaagtgggagggggacttacagtagatgacactgatgggaccttacaagaaaacataggtgccaccacaccacttgttaagactgggcactctataggtttatccctaggagccggattgggaacagatgaaaataaactttgtaccaaattgggagaaggacttacattcaattcaaacaacatttgcattgatgacaatattaacacc

SEQ ID NO: 57 - DNA, 576 bp, Unknown
  Description of Unknown: Human adenovirus 14 sequence
ctgtggacaggagttaaccccaccgaagccaactgtcaaatgatggactccagtgaatctaatgattgcaaattaattctaacactagttaaaactggagccctagtcactgcatttgtttatgttataggagtatctaacaattttaatatgctaactacatacagaaatataaattttactgcggagctgttttttgattctgcgggtaatttactaactagcctgtcatccctaaaaactccacttaatcataaatcaggacaaaacatggctactggtgccattactaatgctaaaagtttcatgcccagcacaactgcttatcctttcaataataattctagagaaaaagaaaactacatttacggaacttgtcactacacagctagtgatcacactgcttttcccattgacatatctgtcatgcttaaccaaagagcaataagagctgatacatcatattgtattcgtataacttggtcctggaacacaggagatgccccagaggggcaaacctctgctacaaccctagttacctccccatttaccttttactacatcagagaagacgac

SEQ ID NO: 58 - DNA, 1677 bp, Unknown
  Description of Unknown: Human adenovirus 14 sequence
atgaggcgagtcgtgctaggcggagcggtggtgtatccggagggtcctcctccttcgtacgagagcgtgatgcagcagcagcaggcgacggcggtgatgcaatccccactggaggctccctttgtacctccgcgatacctggcacctacggagggcagaaacagcattcgttactcggaactggcacctcagtacgataccaccaggttgtatctggtggacaacaagtcggcggacattgcttctctgaactatcagaatgaccacagcaacttcttgaccacggtggtgcagaacaatgactttacccctacggaagccagtacccagaccattaactttgatgaacgatcgcggtggggcggtcagctaaagaccatcatgcatactaacatgcccaacgtaaacgagtatatgtttagtaacaacttcaaagcgcgtgtgatggtgtccagaaaacctcccgaaggtgctgcagttggggatacatatgatcacaagcaggatattttggaatatgagtggttcgagtttactttgccagaaggcaacttttcagttactatgaccattgatttgatgaacaatgccatcatagataactacttgaaagtgggcagacagaatggagtgcttgaaagtgacattggtgttaagttcgacaccaggaacttcaagctgggatgggatcccgaaaccaagttgattatgcctggagtgtatacgtatgaagcctttcatcctgacattgtcttactgcctggctgtggagtggactttaccgaaagtcgtttgagcaaccttcttggtatcagaaaaaaacagccatttcaagagggttttaagattttgtatgaagatttagaaggaggtaatattccggccctcttggatgtagatgcctatgagaacagtaagaaagaacaaaaagccaaaatagaagctgctgcggaagctaaggcaaacatagttgccagcgactttacaagggttgctaacgctggagaggtcagaggagacaattttgcaccaacacctgttccgactgcagaatcattattggccgatgtaactggaggaacggacgtgaaactcactattcaacctgtagaaaaagatagtaagaatagaagctataatgtgttggaagataaaatcaacacagcctatcgcagttggtacctttcgtacaattatggcgatcccgaaaaaggagtgcgttcctggacattgctcaccacctcagatgtcacctgcggagcagagcaggtctactggtcgcttccagacatgatgcaggatcctgtcactttccgctccactagacaagtcagcaactaccctgtggtgggtgcagagcttatgcccgtcttctcaaagagcttctacaacgaacaagctgtgtactcccagcagctccgccagtccacctcgcttacgcacgtcttcaaccgctttcctgagaaccagattttaatccgtccgccggcgcccaccattaccaccgtcagtgaaaacgttcctgctctcacagatcacgggaccctgccgttgcgcagcagtatccggggagtccaacgtgtgaccgttactgacgccagacgccgcacctgtccctacgtgtacaaggcactgggcatagtcgcaccgcgcgtcctttcaagccgcactttctaa

SEQ ID NO: 59 - DNA, 2838 bp, Unknown
  Description of Unknown: Human adenovirus 14 sequence
atggccaccccatcgatgctgccccagtgggcatacatgcacatcgccggacaggatgcttcggagtacctgagtccgggtctggtgcagttcgcccgcgccacagacacctacttcaatctgggaaataagtttagaaatcccaccgtagcgccaacccacgatgtgaccaccgaccgtagccagcggctcatgttgcgcttcgtgcccgttgaccgggaggacaatacatactcttacaaagtgcggtacaccctggccgtgggcgacaacagagtgctggatatggccagcacgttctttgacattaggggcgtgttggacagaggtcccagtttcaaaccctattctggtacggcttacaactctctggctcctaaaggcgctccaaatgcatctcagtggttggataaaggggttgaaactactgaagaacggcaaaatgaagacggggaaaatgacgaaaaagctacatacacttttggcaatgccccagtaaaagccgatgctgacattacaaaagacggactaccaataggtttggaagtcccagctgaaggtgaccctaaacctatctacgctaataagctttaccaaccagaaccccaggtgggacaggaatcgtggactgatacagatggcactgaagaaaaatacggaggcagagtacttaaaccggacactaaaatgaaaccgtgctatgggtcttttgctaaacctactaatgtgaaaggcggacaggcaaaagtgaaaacagaagaaggcaacaacattgaatatgacattgacatgaacttttttgacttaagatcacaaaaacaaggtcttaaacctaagattgtaatgtatgcagaaaatgtggacctggaatctccagatactcatgttgtgtacaaacctgaagtttcagatgctagttcaaatgctaatcttggacagcagtctatgcccaacagacccaactacattggcttcagagataattttattggtcttatgtactataacagtactggtaacatgggggtgctggctggccaagcatctcagttgaatgcagtggttgacttgcaggacagaaacacagaactgtcttaccaactcttgcttgactccctgggcgatagaaccagatactttagcatgtggaatcaggctgttgacagttatgatcccgatgtgcgtgttattgaaaatcatggtgtggaagatgaacttcccaactactgttttccactggacggcatcggtccgcgaacagatagttacaaggagattcagttaaatggagaccaagcttggaaagatgtaaatccaaatggtatcagtgaacttgttaagggaaatccatttgccatggaaattaaccttcaagccaatctatggcgaagtttcctttattccaatgtggctctgtatctcccagactcgtacaaatacaccccgtccaatgtcactcttccagaaaacaaaaacacctacgactacatgaacgggcgggtggtgccgccatctctagtagacacctatgtgaacattggcgccaggtggtctctggatgctatggacaatgtcaacccattcaaccaccaccgtaacgctggcttgcgttaccgatccatgcttttgggtaacggacgttatgtgcctttccacatacaagtgcctcaaaaattcttcgctgtcaaaaacctgctgcttctcccaggctcctacacttatgagtggaacttcaggaaggatgtgaacatggtgctacagagttccctcggtaacgacctacgggtagatggcgccagcatcagtttcacgagcatcaacctctatgctacctttttccccatggctcacaacaccgcttccacccttgaagccatgctgcggaatgacaccaatgatcagtcattcaacgactatctatctgcagctaacatgctctatcccattcctgccaatgcaaccaatattcccatttccattccttctcgcaactgggcggctttcagaggctggtcatttaccagactcaaaaccaaagaaactccctctttggggtctggatttgacccctactttgtctattctggttctattccctacctggatggtaccttctacctgaaccacacttttaagaaggtttccatcatgtttgactcttcagtgagctggcctggaaatgacaggttactatctcccaacgaatttgaaataaagcgcactgtggatggcgaaggctacaatgtagcccaatgcaacatgaccaaagactggttcttggtacagatgctcgccaactacaacataggctatcagggcttctacattccagaaggatacaaagatcgcatgtattcatttttcagaaacttccagcccatgagcaggcaggtggttgatgaggtcaattacaaagacttcaaggccgtcgccataccctaccaacacaacaactctggctttgtgggttacatggctccgaccatgcgccaaggtcaaccctatcccgctaactatccctatccactcattggaacaactgccgtaaatagtgttacgcagaaaaagttcttgtgtgacagaaccatgtggcgcataccgttctcgagcaacttcatgtctatgggggcccttacagacttgggacagaacatgctttatgccaactcagctcatgctctggacatgacctttgaggtggatcccatggatgagcccaccctgctttatcttctcttcgaagttttcgacgtggtcagagtgcatcagccacatcgcggcatcatcgagacagtctacctgcgtacaccgttctcggccggtaacgctaccacgtaa

SEQ ID NO: 60 - protein, 325 aa, Unknown
  Description of Unknown: Human adenovirus 14 sequence
MTKRVRLSDSFNPVYPYEDESTSQHPFINPGFISPNGFTQSPDGVLTLKCLTPLTTTGGSLQLKVGGGLTVDDTDGTLQENIGATTPLVKTGHSIGLSLGAGLGTDENKLCTKLGEGLTFNSNNICIDDNINTLWTGVNPTEANCQMMDSSESNDCKLILTLVKTGALVTAFVYVIGVSNNFNMLTTYRNINFTAELFFDSAGNLLTSLSSLKTPLNHKSGQNMATGAITNAKSFMPSTTAYPFNNNSREKENYIYGTCHYTASDHTAFPIDISVMLNQRAIRADTSYCIRITWSWNTGDAPEGQTSATTLVTSPFTFYYIREDD

SEQ ID NO: 61 - protein, 91 aa, Unknown
  Description of Unknown: Human adenovirus 14 sequence
DGVLTLKCLTPLTTTGGSLQLKVGGGLTVDDTDGTLQENIGATTPLVKTGHSIGLSLGAGLGTDENKLCTKLGEGLTFNSNNICIDDNINT

SEQ ID NO: 62 - protein, 192 aa, Unknown
  Description of Unknown: Human adenovirus 14 sequence
LWTGVNPTEANCQMMDSSESNDCKLILTLVKTGALVTAFVYVIGVSNNFNMLTTYRNINFTAELFFDSAGNLLTSLSSLKTPLNHKSGQNMATGAITNAKSFMPSTTAYPFNNNSREKENYIYGTCHYTASDHTAFPIDISVMLNQRAIRADTSYCIRITWSWNTGDAPEGQTSATTLVTSPFTFYYIREDD

SEQ ID NO: 63 - protein, 558 aa, Unknown
  Description of Unknown: Human adenovirus 14 sequence
MRRVVLGGAVVYPEGPPPSYESVMQQQQATAVMQSPLEAPFVPPRYLAPTEGRNSIRYSELAPQYDTTRLYLVDNKSADIASLNYQNDHSNFLTTVVQNNDFTPTEASTQTINFDERSRWGGQLKTIMHTNMPNVNEYMFSNNFKARVMVSRKPPEGAAVGDTYDHKQDILEYEWFEFTLPEGNFSVTMTIDLMNNAIIDNYLKVGRQNGVLESDIGVKFDTRNFKLGWDPETKLIMPGVYTYEAFHPDIVLLPGCGVDFTESRLSNLLGIRKKQPFQEGFKILYEDLEGGNIPALLDVDAYENSKKEQKAKIEAAAEAKANIVASDFTRVANAGEVRGDNFAPTPVPTAESLLADVTGGTDVKLTIQPVEKDSKNRSYNVLEDKINTAYRSWYLSYNYGDPEKGVRSWTLLTTSDVTCGAEQVYWSLPDMMQDPVTFRSTRQVSNYPVVGAELMPVFSKSFYNEQAVYSQQLRQSTSLTHVFNRFPENQILIRPPAPTITTVSENVPALTDHGTLPLRSSIRGVQRVTVTDARRRTCPYVYKALGIVAPRVLSSRTF

SEQ ID NO: 64 - protein, 945 aa, Unknown
  Description of Unknown: Human adenovirus 14 sequence
MATPSMLPQWAYMHIAGQDASEYLSPGLVQFARATDTYFNLGNKFRNPTVAPTHDVTTDRSQRLMLRFVPVDREDNTYSYKVRYTLAVGDNRVLDMASTFFDIRGVLDRGPSFKPYSGTAYNSLAPKGAPNASQWLDKGVETTEERQNEDGENDEKATYTFGNAPVKADADITKDGLPIGLEVPAEGDPKPIYANKLYQPEPQVGQESWTDTDGTEEKYGGRVLKPDTKMKPCYGSFAKPTNVKGGQAKVKTEEGNNIEYDIDMNFFDLRSQKQGLKPKIVMYAENVDLESPDTHVVYKPEVSDASSNANLGQQSMPNRPNYIGFRDNFIGLMYYNSTGNMGVLAGQASQLNAVVDLQDRNTELSYQLLLDSLGDRTRYFSMWNQAVDSYDPDVRVIENHGVEDELPNYCFPLDGIGPRTDSYKEIQLNGDQAWKDVNPNGISELVKGNPFAMEINLQANLWRSFLYSNVALYLPDSYKYTPSNVTLPENKNTYDYMNGRVVPPSLVDTYVNIGARWSLDAMDNVNPFNHHRNAGLRYRSMLLGNGRYVPFHIQVPQKFFAVKNLLLLPGSYTYEWNFRKDVNMVLQSSLGNDLRVDGASISFTSINLYATFFPMAHNTASTLEAMLRNDTNDQSFNDYLSAANMLYPIPANATNIPISIPSRNWAAFRGWSFTRLKTKETPSLGSGFDPYFVYSGSIPYLDGTFYLNHTFKKVSIMFDSSVSWPGNDRLLSPNEFEIKRTVDGEGYNVAQCNMTKDWFLVQMLANYNIGYQGFYIPEGYKDRMYSFFRNFQPMSRQVVDEVNYKDFKAVAIPYQHNNSGFVGYMAPTMRQGQPYPANYPYPLIGTTAVNSVTQKKFLCDRTMWRIPFSSNFMSMGALTDLGQNMLYANSAHALDMTFEVDPMDEPTLLYLLFEVFDVVRVHQPHRGIIETVYLRTPFSAGNATT

SEQ ID NO: 65 - DNA, 114 bp, Unknown
  Description of Unknown: Human adenovirus 16 sequence
cattatctataatataccttatagatggaatggtgccaacatgtaaatgaggtaatttaaaaaagtgcgcgctgtgtggtgattggctgcggggtgaacggctaaaaggggcgg

SEQ ID NO: 66 - DNA, 114 bp, Unknown
  Description of Unknown: Human adenovirus 16 sequence
ccgccccttttagccgttcaccccgcagccaatcaccacacagcgcgcacttttttaaattacctcatttacatgttggcaccattccatctataaggtatattattgataatg

SEQ ID NO: 67 - DNA, 365 bp, Unknown
  Description of Unknown: Human adenovirus 16 sequence
gcaatgctgggatgtgacgtaacttatgtgggaggagttatgttgcaagttatcgcggtaaaggtgacgtaaaacgaggtgtggtttggacacggaagtagacagttttcccacgtttactgacaggatatgaggtagttttgggcggatgcaagtgaaaattctccattttcgcgcgaaaactgaatgaggaagtgaatttctgagtcatttcgcggttatgacagggtggagtatttgccgagggccgagtagactttgaccgtttacgtggaggtttcgattaccgtgtttttcacctaaatttccgcgtacggtgtcaaagtcctgtgtttttacgtaggtgtcagctgatcactagggta

SEQ ID NO: 68 - DNA, 3431 bp, Unknown
  Description of Unknown: Human adenovirus 16 sequence
tttaaacctgtcgagttccgtcaagaggccactcttgagtgccagcgagaagagttttctcctccgcgctgcgagtcagttttgcgctttgaaaatgagacacctgcgattcctgccacaggagattatctccagcgagaccgggatcgaaatactggagtttgtggtaaataccctgatgggagatgacccggaaccgccagtgcagcctttcgatccacctacgctgcacgatctgtatgatttagaggtagacgggcctgatgatcccaatgaggaagctgtaaatgggttttttactgattctatgctgctagctgccgatgaaggattggacataaaccctcctcctgagacccttgataccccaggggtggttgtggaaagcggcagaggtgggaaaaaattgcctgatctgggagcagctgaaatggacttgcgttgttatgaagagggttttcctccgagtgatgatgaagacggggaaactgaacagtccatccataccgcagtgaatgagggagtaaaagctgccagcgatgtttttaagttggactgtccggagctgcctggacatggctgtaagtcttgtgaatttcacaggaataacactggaatgaaagaactattgtgctcgctttgctatatgagaatgcactgccactttatttacagtaagtgtatttaagtgaaatttaaaggaatagtgtagctgtttaataactgttgaatggtagatttatgtttttgcttgcgattttttgtaggtcctgtgtctgatgatgagtcaccttctcctgattcaactacctcacctcctgaaattcaggcgcccgtacctgcaaacgtatgcaagcccattcctgtgaagcctaagtctgggaaacgccctgctgtggataagcttgaggacttgttggagggtggggatggacctttggaccttagtacccggaaactgccaaggcaatgagtgccctgcagctgtgtttatttagtgacgtcatgtaataaaattatgtcagctgctgagtgttttattgcttcttgggtggggacttggatatataagtaggagcagatctgtgtggttagctcatagcaacctgctgccatccatggaggtttgggctatcttggaagacctgagacagactaggctactgctagaaaacgcctcggacggagtctctggcttttggagattctggttcggtggcgatctagctaggctagtgtttaggataaaacaggactatagggaagaatttgaaaagttattggacgacagtccaggactttttgaagctcttaacttgggccatcaggctcattttaaggagaaggttttatcagttttagatttttctactcctggtagaactgctgctgctgtagcttttcttacttttatattggataaatggatccgccaaacccacttcagcaagggatacgttttggatttcatagcagcagctttgtggagaacatggaaggctcgcaggatgaggacaatcttagattactggccagtgcagcctctgggagtagcagggatactgagacacccaccggccatgccagcggttctggaggaggagcagcaggaggacaatccgagagccggcctggaccctccggtggaggagtagctgacttgtttcctgaactgcgacgggtgcttactaggtctacgtccagtggacaggacaggggcattaagagggaaaggaatcctagtgggaataattcaagaaccgagttggctttaagtttaatgagccgtaggcgtcctgaaactgtttggtggcatgaggttcagagcgaaggcagggatgaagtttcaatattgcaggagaaatattcactagaacaacttaagacctgttggttggaacctgaggatgattgggaggtggccattaggaattatgctaagatatctctgaggcctgataaacagtatagaattactaagaagattaatattagaaatgcatgctacatatcagggaatggggcagaggttataatagatacacaagataaagcagcttttagatgttgtatgatgggtatgtggccaggggttgtcggcatggaagcagtaacatttatgaatattaggtttaaaggggatgggtataatggcattgtatttatggctaacactaagctgattctacatggttgtagcttttttgggtttaataatacttgtgtagaagcttgggggcaagttagtgtgaggggttgtagtttttatgcatgctggattgcaacatcaggtagggtcaagagtcagttgtctgtgaagaaatgcatgtttgagagatgtaatcttggcatactgaatgaaggtgaagcaagggtccgccactgcgcagctacagaaactggctgcttcattctaataaagggaaatgccagtgtgaagcataatatgatctgtggacattcgaatgagaggccttatcagatgctgacctgcgctggtggacattgcaatattctggctaccgtgcatatcgtttcccatgcacgcaagaaatggcctgtatttgaacataatgtgattaccaagtgcaccatgcacataggtggtcgcaggggaatgtttatgccttaccagtgtaacatgaatcatgtgaaggtgatgttggaaccagatgccttttccagagtaagcttaacaggaatctttgatatgaatattcaactatggaagatcctgagatatgatgacactaaaccgagggtgcgcgcatgcgaatgcggaggcaagcatgctagattccagccggtgtgcgtggatgtgactgaagacctgagacccgatcatttggtgcttgcctgcactggagcggagttcggttctagtggtgaagaaactgactaaagtgagtagtgggacgagctgtggaggtgggactttgaggttggtaaggtgggcagattgggtaaattttgttaatttctgtcttgcagctgccatgagtggaagcgcttcttttgaggggggagtatttagcccttatctgacgggcaggctcccaccatgggcaggagttcgtcagaatgtcatgggatccactgtggatgggagacccgtccagcccgccaattcctcaacgctgacctatgccactttgagttcgtcaccattggatgcagctgcagccgccgccgctactgctgccgccaacaccatccttggaatgggctattacggaagcatcgttgccaattccagttcctctaataacccttcaaccctggctgaggacaagctacttgttctcttggctcagctcgaggccttaacccaacgcttaggcgaactgtctaagcaggtggcccagttgcgtgagcaaactcagtctgctgttgccacagcaaagtctaaataaagatcttaaatcaataaa

SEQ ID NO: 69 - DNA, 19627 bp, Unknown
  Description of Unknown: Human adenovirus 16 sequence
atggccagccgcggaggaaatcagtcaagcgaccgccaacgggagcacacccccgaacgcggaatgggctctgccagccatccgcctccaaggccagaccgcagcccatctcagtcgcctccacctctgcccccgaagaggaacacctaccgtcgcgtggggtccgattcttctatcgagagccaggtggtactggtaagcgaaacttcgcggtcatccctgtctccggaacggagcaacagtcctcccccgatccctcccaagaagaagcccaggaagaccaagcatgtccctctgcaagacatcagccaggacagcgaagaagaaagagaacaggctcagttggtggccgtgggcttcagctaccccccggtgcgcatcattgagaaggatggcaagagaagtgttgagaagatcgacaagaatgaccctatagctaaaggagctacttctattgctgttaggaatcctttgagcttgcccctggtatctgcctgggagaagggcatggaagtgatggctgtgctaatggagaggtataggctggataatgacctgagaacctctttcaagctgatgccagagcagcacgagcagtacaagcgtatctgccaccagtatgtgaacgaggagcaccgtggcattccgctgacatttagtagcatgaagaccctgacagcgatgatgggaagattcatgcagggattggtgcattcttattctgagatcgcccacaataattgggagtgcaccgggtgcgctctgtgggctcatggatgcaccgattacgaaggcaaggtgaaatgcctgcatggcactatcatgatccagaaggaccacattatcgagatggatgtggcgagcgagaacgggcagcgcgctatgaaggagaacccagacagagccaagatcacccagaaccgctggggcagaaatgtggttcagttggccaacaacgatgcccgctgctgtgtaaatgatgccaactgtgctactaaccaattttccagcaagtcctgtggaatgttctacaccgagggaagtaaggctcaggaagctttcaagcagtacgaagccttcatgaaggccgtatatccagggataacccccgaccaagccaggatgatgctgattcccattcattgcgattgcaaccacaagccaggctgcgctcccgtgatgggcaggcagacctgtaagatgaccccctttgggatggccaatgctgaagacttggatgtgactaccatcagtgacccgaccgtgctggcaagcgtgagacacccagccttgatggtgttccagtgttgcaacccagtgtaccgcaactcccgtgtccagaatgccggccccaactgtgatttcaagatctctgctcctgacctgcttggcgccctgcaactgaccagaaagttgtggcaagacacctttcccgagattccagttcccaagctggtgatccccgagttcaagtggcagaacaggttacagttccgcaacgtatccctgcccgcgggccactatgactcccgccagaacccatttgatttctgagtgaatgatgaaaacgaatgagcaaaaaaccagagccttagtgcatgtaaaaataaagtgctttttattgaacacggttttacatgacttattgcatatccatacggtcaaacgcggtggccctttcgatgcgtgcgcggtgagaacgaaagtaagatgagtgggtgtttaggaagcggtatagtgcctcctggttgcggcgcagggtgggctggacttggggagattggagcatgctgttgggcaccccagtcagcaacttcatggtggggtttccgttcatgggacggtcgggccagtgcacaaaggcatgaaggaacatacagcaaaaaagtccacaggcggctgagcgtgggccctgcacgctctgggtggacttttccagggtgatgcagcggtctttggtagcaagggcactgcggcgcaggagcccctcgtactcaaactggtaaatctgtttgagtcgctcatccgagaacccaaaaggatcaaaaaggtagcaggtgttggagcgcgggttccaaccaaaagccagccagtgctctccccccgtctcgcgtccggcagtgttgactatggcgcaggcgagcttgtcgggggccatgaaccccgggaaacgcttgtcaaaggttcccaggaaatagggaccgcaacccaggtctcggacgatggctttgagctcttgctcgctggagccgtttccggacccgcatgacatggctgcagctgctgcttgcaagaagcaagaggcttcttatgtggtggcgttgccggccgagaacggtgtgcgcaggtagacggcctcgatgacgccgcggtgtggctggtgcactctgaccacgtcgaagacttcgaaaagaagataaagcagggtgggctcatccatgggatccacctcaaaagtcatgtccagtgcatgggccgagttggcatagagcaggttttgtcccaggtctgtaagggcccccatggacatgaagttgctggagaacggtatgcgccacatggtcctgtcgcacaggaactttttttgggtaacactcttaacggcagtagttccgatgagcgggtatggataattggctgggtaaggttccccttgtctcatagtaggcgcaaggtatcctacaaagccagagttgttgtgttgatatggtaaggtgacggctttgtagtcagtgtaattaacctcatcaaccacctgcctgctcataggctggaagtttctgaaaaaggagtacatgcgatccttgtatccctcagggatgtaaaagccctggtagccaatgttgtagttggcgagcatctgtaccaagaaccagtctttggtcatgttgcattgggctacgttgtagccttcgccatccacagtgcgctttatttcaaattcgttaggagatagtaacctgtcatttccaggccagctcactgaagagtcaaacatgatggaaaccttcttaaaagtgtgatttagatagaaggtaccatccaggtagggaatagaaccggaatagacaaagtatgggtcaaatccagaccccaaagagggagtttctttggttttcagtctggtaaatgaccagcctctgaaagccgcccagttgcgagaaggaatggaaatgggaatattggttgcgttggcaggtatggggtagagcatgttagctgcagataggtagtcgttgaatgactgatcattggtgtcattccgcagcatggcttcaagggtggaagcggtgttgtgagccatggggaaaaaagtagcataaagattgatgctcgtgaaactgatgctggcgccatctacccgtaggtcgttaccaagggaactctgtagaaccatgtttacatccttcctaaagttccactcataagtgtaggagcctgggagaagcagcaggtttttaacagcgaagaatttttgaggcacttgtatgtggaaaggcacataacgtccgttacccagaagcatggatcggtaacgcaagccagcgttacggtggtggttgaatgggttgacattgtccatggcatccagagaccacctggcaccaatgttcacataggtgtctactagagatggcggcaccacccgcccgttcatgtagtcgtaggtgtttttgttttctgggagagtgacattggacggggtgtatttatacgagtctgggagatacaaagccacattggaataaaggaaacttcgccatagattggcttggatgttgatttccatggcaaaaggattgcctccatggatttcattagcagtactaactgtggtgtcatctttgtcccactgtgttccactggttccagcaactgcatctgttttaactttaacaccttggtaagtgtctgtaaatcccacaccattcaacggaaagcaatagtttggcaattcgtcctccacaccatggttttcaataatacgcacatcaggatcatagctgtccaccgcctgattccacatactgaaataccgggttctgtcacccagagagtcaagcaagagctggtaggacagttcagtgtttctgtcttgcaagtcaaccacagcattcagctgagaggcctgaccggccagcacccccatattgccagtgctgttgtagtacatgagcccaataaaattgtctctgaagccaatgtagttgggtctgttaggcatggcttgctgacccaaattggattcagagctggtgtcctctgttccaggtttgtatacaatatgagtatctggagtctgcaagtcaacattttctgtgtacattacaatatctggatcgtagttagcagcaatatttttgttgtcaaagaaagccagatctatatcatagttaggagtggtggcggcggtttctgaatcttttaagttagcctgaccaccttctttgttggtaggcttggcgaaagaaccatagcagggtttcatctttgtagtgtccttcagagctctgcctccatatttttcctctgtaccattggcgtcaacccaactggcatttccaacttgtggttctggttggaaagttttatcagcataaattactgtgtcagttccagaagttgaatctattccaataggcagcccatcagcttctatctttttcccagtaacaccgggcatggcagctaccccaaaggtatgcattttgctgtcagaatccttccactggcaggtgttgggcgctcccttgggagccaggctgttgtaggcggtcccggagtagggtttgaagctagggccccggtccagcacgccgcggatgtcaaagaacgtgctggccatatccagtactctgttgtcccctacagccagcgtgtagcgaactttgtaagagtaggtattgtcttcccggtcaacgggcacgaagcgcagcattagtcgctggctacggtcggtggtcacatcgtgggtgggcgccactgtggggtttctaaacttgttccccatactgaagtaggtgtctgttgcacgggcgaactgcaccagacccggactcaggtactccgaagcatcctgtccggcgatgtgcatgtatgcccattggggcatcatcgatggggtggccatcttgaaagcaactcagcctcggcgcgcgacctcttcctttctcctctgctgcggcggcatggtgatgatacatacacacagacaagcaagttaagcgctactccatatttaattaatagcagcgacggcgctttacactctgcacgcccagacccacgatgctgttcagagtactctgccagtttgctttcgggcgcggtgtgccccaggacgcggtctggctacggcgacgggctgtacggcggtgggctttctggtagcgacaggtttgggaataggcgccgcagaagcagggggaggaggcaagtccaaggtggcaggccgatgcgactgagaaggtttcatcaccccggtagccatgtgagctacaggcctggtagtgggcattccgagctttactgcctcctcgtatgaagggggctcgtctgcgcgcgtcaccaacgtctgttccagctcgggacgcggtcgcttgtcgccccgcttctccagcggaggaagctcttcctccacttccatttcaccaggagttgcgggcggcgggtccaggcggctgtttatctgtttctgcacagcctggttggctagatccactacgccgttaataccagaggcgataccatcgaccaccttttgttggaagttctgctccttaagcttatttctaagggcctgccctgtgctgctgttccaagctttgttcccataggtttttatggtcgagccaaaatttttaagcccgctccagatactgctccaattgaaggcgcccccgttcagttggctcgtgccgatgtcgctccaggtgcccatgtacggcctcgtgccgtgtcgcggagccagggatgaaaaattgatgtcttccatctctacaaaaacatagtcacaggaccaggagcgtcagagtccattctattttttatttataaatttttccattgttagtggcgctgcgaggcctgaaccgccacggaagctatgcctggtatcgccccgatcgccgcggcgatgatgggtataagagctggcagaaagccaccccctaatcgcttgctgatagcgcgccttcgtctgtggcggcgcatccctcgccccaacatccttctacggcgcgagtttcttcctcggtagccagtaatggggacgcgaaggcggcaagtgagagccatatctgcaaggaggcagcgtcaacagtcattaagtggtgatgcttggatgatagcgcgcgcgcggcagcgtcagaggttcagcgcgaccatcgcggtacactctccgcaccagggcggcgggagttaatttgctggcagtggtgcggcggcggcgacggcgagtgcgacttgcaggtagtttgcggcggcgtgaggtgttgctccgacttcgatagtagcgagtgcctctgtaacccggagtgggaatgatggatgggtgcagagcatagttgggcattagcagacttgctgggccatactttcgacgtgatcttctagtggtgctgggggcggcaacgggcgcgggcatccagggttccgtctgaacctcaattgaggtgactgtgggttttgcaggttcggtctgcacttccatggactcagtgggaatcttgatgtcaaaggtttgtactcccaaacctggcgccacttccttgatgggtctcactttcacctcaggctggatatcggcatccactttcattttctccagtacgtcttctaatctctgccgcttgggcaccattagctgcatggtgggatataggtcctcaccctcgcgctttacgcctctgctcgcaggtacgggcagcacttgctgcagggtgactggtttgaggctaggggtgggatttccatgatccaagggaatagataccgcctcctctttgggactggatcttgtgcgcttgccataagcaaactcgccaaggcggtctgccgcctgctcaataatatcgtcatccccatacacctcatcataggaccgtttaaaagtagtgctggaacgctcgccaggtgtaaagaccacagtggtcccgggtctaagcacttggcgtacttttcgaccgcgccactgcacgcgccgtcttggcgcgaactcgcgcacaaactccaccagtccatcatcgccatcttcttcttttttgtcctttttaacccgcttgattttgcggggctttttttcatccttcatcggcggaccgtagatttcaggcgcgatgacctggagcatctcttccttgtatttgcgcttggacatacttgccgctgggacacaacatcggagactgctcagtatcttctaagtgcgaggggggcgggtgcgcacgggcacgcgctggccggtagtggcatcgcgcacccaatacacattgcctcttcgcggttgggccatgttggcaatggccgctgctgccgccgtggccgcgcgcctgcgggacctgccgctgctagcaccagaagccgcgcgtctggccgctctaagcatggctcttcgtcccacacgtttggccctccgcagaatagcttttgcagctcgcatagcgggagtagccctgtggcgcctggcgatgcgcctccttcggctcttccggcgagcataggcgcgagcgtctgccactacactgtcaataactgcatccacagtagatgtaggcgcagtaggagtataattacgagcatcggcaaccacctggtcgatcacatcatcgaccgtggtccgagtgcgggtacggcccttgagggcgccccagggagcgcggaaatgaccgcgaacgcgcacggggtgctgggtagagcgtttgcgggcgcctccgtacatcttggtgggcgcatgcagtccccaaccggtattattactgggcgagatgagaatggacatttttttttttttttagaaagtgcggcttgaaagaacgcgcggcgcgactatgcccagggccttgtaaacgtagggacaggtgcgacgtctggcgtcagtaacggtcacgcgctggactccccggatactgctgcgtaacggcagggtcccgtgatctgtgagagcaggaacgttttcactgatggtggtaattgtgggcgccggcgggcggatgaggatctggttctcagggaagcggttgaagacgtgcgtgagcgaggtggactgtcggagctgctgagagtacacggcttgctcattgtagaaactctttgagaagaccggcataagctctgcacccactactgggtagttgttgacttgtctcgaggagcggaaggtgatggggtcttgcatcatgtcggggagcgaccagtagacctgctcggctccacaggtgacatccgaagtggtgagcagtgtccaggaccttattcctttctcagggttaccataattgtaggacaggtaccagctgcggtaggctgtgttgattttgtcttccaagacattgtagcttctattcttgctgtctttttctaaaggttggatctttaactcttttttaacttcagacataagtaatagttctgcagctgcagcttcacgtttttgtttttcagttatataagtatctcctctagttatattatcatcttcactggtttcctctgcaacagccactgtggttgttttaaccaccgccttttcgcctgtttcagtagtggtatcctttttgctttcctcataggcagtgacatccaaaagggcaggaatattacccccttcaagatcttcatacatgattttgaaaccctcctggaatggatgtctcttcctgatgccaagcaagttgctaagtcggctttcagtaaaatctaccccgcaaccaggcaacaaaacaatgtcaggatggaatgcctcataagtgtagacccctggcataatcaacttagtttcggggtcccacccgagcctgaagtttctagtgtcaaacttaacaccaatgtcactttccagcactccattctgtctgccaattttcaggtagttgtcaatgatggcattgttcatcaggtcgatggtcatggtagctgagaagttaccttctggtaaagtgaactcaaaccactcatatttcaaaatatcatctttatgatcatttactgtaacaccttcaggagccttcctagataccatcaccctcgccttaaacttgttgctgaacatgtactcgttcacgttgggcatgttggtgtgcataatggtcttcagctgaccgccccaccgcgaccgctcgtcaaagttaatggtctgggtgctagcctccgtgggggtaaagtcattgttctgcaccactgtggtcaggaagttgctgtggtcgttctgatagttcagggaggcgatgtccgccgacttgttgtccaccagatacaacttggtggtatcgtactggggtgacagctccgagtaacgaatgctatttctcccttccgtaggcgccaggtaccgagggggtacgaagggagcctccagtgggggctgtatcatcgccgcctgttgctgcatcacgctctcgtaagaaggaggaggaccctccggatacaccaccgctccgcctagcacggctcgtctcctcatcgtactagatacagataacaaaaaaaagaacgaacgcacgctcggttgccatggccttggtgagttgcctttttatttttactttcacttttacaacatgcgaccgaaacggggacgcagatgagcgaacgggttgccaactccttttccacccaagtccaacacgctgctgtcatcggcagagtcctcgtcgtcccacacaagacccatctgcctgtcgtggcgctggcgtctacggctcggtctgcttgtagcccccaagatcctgggctcgtctctgtgatcctgcgcataggtcttccatctactcatcttatccaccaggctctctattccattgttagggaagttcttttccctctctggcctcagcaaagagtcattcaagtactcatcctcgcccatcaagcgcgggcggtttattctccccagttcactgctgcgaacgctgtttagtgaaaaggacaagctagggaaaggactcgcagcttcgggcacggccgcggcagcaccagccgttccgggcaacgatacggaagagtgccttctatcgcccccttccttcttccaaaccgtataacctggcggcggggaaaatatgctactgtccacatcgtcccataggaacccgtcattgggatcgggcatgtcgtattcgccagtgtagaaaccaggtgggggcagccagtgtgggttcagaatagcattggtgaaataatcagagttcatggcggccgccctgtgcaggtagtccagcagtttgttaatgaaaggcctgttactagcatacatgctgggctccatgtttcgagctgtcatatccagcgcggcggtaggtgtcgccccctcctgcatcaaaaacagtccaacgctctgttgcacgtatcttaggatccgctcctcctcagcggtaagcgcatactgaggagggatcttctgcgaccggttggttagtaagaagttcagggtggcttccaaaccgcctgtgtcttcctgacccagggcgcggctcacttgggtgatttcttgataggtctgctcgtccacctggctctgtcctatagcctcgcgatacaggttaagcaggtagcccaagtaggagttgcggtcgatgctaccgctgtcagtgaagggggataccagcagcagcagcaggcgggagttgggagtcagcaagctagacacggtcgcgcgatctcctactggggcgtgcactccccacagacccttcaggttcttgaaagcctgggtcaggttcactgtctgcaagccctgtctgctggtctggaagaagtaatctggcccggactggtacacctcgctctggggcacctcagataccatgagtctcaatgcactcaaaaagtttgtatagtcttgctgaccacggggcacgttggcgggctgggtgctaaggaaagcgtttagcgctaccaatgaccccaagttggcgtcgcgctggaaccgctcgcgctgagacacagcctcgcgcacatcggtcaccatccggtccaggttggtctgcacgttgctgctgttgtaacgggccacgcgctccaaaagagcattgtataccagcccggcctcatcgggacggatggccttgttctccaccagcgcgttcacgatagccaggaccttctcgtgggtggggttggagcgggagggcactacggcctccagtatggccgaaaggcggttggcctggggttgctgtctaaaggcttcggggttgcgggtcgtcagcgccattatacgttgcatggcctgggtccaatcgtccgaggagttaatgccggacggctggctctgtagcgccgcccgcattgcggggtccggtgcctgctgttgttccatctagcaaaaatacgggtcgcgccatcagtcttccaagtactcgccctcctcgtcctcgacttcatccacctcttctatgtaaggaagctcacaccctgcagcctccatggccctgcgactgggttgccattgcaagtccgctcccatgtcaaagtagttctccccatcagttccggcccccgttagagccctttgcaagctgtgcataagttctctgtcgctcagctcgcgcctcctgctggcgctcaccgcgcggtgcatcctgtcattgcgatacacccccagatcgtcgcttaaagtcaacaccttgagagtcatgcgcatgtaaaacccatctatcttcacctccttgtcaatgggtacgtagggggtcttgtagatcttgcgagcgtagtatttgcccaggctcaagaccgagtagttgatagctgccactttctcagccaaacccaggctacgttcctgcactataatactttgcaggatgttaatcagatcatacagccatctcccatcaggctcggtgatattcaacaacgcctccctgaatgcctcgttgtccctgctatgttgaaccaccagaaacagctgagctgtcaggggtttgctagtggggttctgggtgatagcctccatcaggtcccacaggtgcatcagacccagggtcacttcctcgcgggcgatcagggtgcgcacatggttgttaaaagatttttggaagttgcgctcctccttcacggtctgctcgtaggccgagactaggttggccgcggccacatgtgccctagctgggctgatccctgtcacttcatcgacctcaaaatcctcgtcttgcagcacccgtcttcgatccagaccgtggcgcagctcgcgacccgcgttaaatcgagatgctcgcatctcctctggctcctcgccgctcctgtccctgaataggttctgttggggcacgtacgcctcgcgagagtccttttttagttgcacccgcgggtgccgctcgggcgatggagcccccaggcgcgccaatccctcgccctcttccaagtccagatcataggcgggctgtcccgcgccgctgacggctgcagccgcagtagttacaggagcaggaagagccttttgtggctgttgttgtagctgctgctgagaagggggctgttgctgggggcgcatctgtcgcagcacgggatgcatctgggcaacaaaaaacaaaaaaaagagggctcgctcccgtaaactggagaagtcggctggcggggtcttagaaatgacgaggctgccaaaccctcgcttgtcgcggaaaccggccgatccggcgcgctaagactcgaaccggggcacaccgcaacgcaaccctggcgattgattctccagactacgggcgcgagccactcccagccccgagaactgagtgttctaaagcttgacgcagcactggctcccatccaggaaaaagcaaaaaaaaaacgacccgcctccgtatcctggaggttttgtgcaggcctgggtcgagacgggagtgccagtaccacgttagctgcggctccagcctgatccgagattcgaaccggggtacacgcgcagcccaacccgttcgcttagcctccaggccacggagacgagccgctgaccgctttcgtttttgcccgtatgtctagagcatcaacgactgtgcgcgtctcacgggccaaaccgtgcctaccatgaactacttcatgccgctgcgcaacatctggaaccgcgtacgcgagttcccgcgggcatccaccaccgcctccggtatcacctggatgtccaggtacatctacggttatcaccgcctcatgctggaagacctcgcccctggcgccccggctacagagcgatggcccctataccgccagccgccgcctcactttctcatcggctaccagtacctggtgcgcacctgtaacgattacatctttgacacccgcgcctactcgcgcctcaagtacaccgagattgtgcgtccggggcaccagacagtcaactggtcagtcatggccaactgctcctacacaatcaacaccggggcttaccaccgcttcgtggactttgacgacttccaagccaccctcacccaggtgcagcaagccatcctcgcagaaagggttgtagcggacctggcacttgtccagcccatgcgcgggttcgggatcactcgcatgcatggcagagcgggcgaagaagaagtgcccgtggaacgactcatgcaagactactataaagatctggccagatgtcaggataatgcttggggaatggcccatcgcctgcgcatccaacaagccggacccaaagacctggtgctcctcgccaccatccgccgtctcaaaactgcctattttaatttcatcaccagcagcatcgtctcaccctccaaagaggaggaaggagaagaaagagagaaccccgaccgagcgtctagccgcccccgcccgcaagaaacagtgctcagcctaccttgcgattgcgactggttagacgctttcgtcgaaaggttttcagatcccgtggatcttgagacgatcaggtccttgcgcggagtacctacggggcaattgataaaatgcataatcagcgcggtgtccctgcccaacggagagcctcccagtcaccacttcagggagatgcgcggaggcgtcttcactctgagacccagggagaacggtcgtgccgtcaccgagaccatgcgccgccgccgcggagaggtcattgaaagattcatcgaccgtctgcctgtgcgccgccggcgtcgccgcgttccccctcctcctgcagccccacctgaagaggaagagatgttagtggaagaagaagaaattgaggaagaaatcccgggggctttcgagcgcgaggtgcgcaccaccatcgccgaactcatccgtcttctggaagaggagttgaccgtgtccgcgcgtaactcccagtttttcaactttgccgtggacttctacgaggccatggagcgcttggaagcgctgggcgatgttagcgagatgccgctgagacgatggatcatgtatttcttcgtcaccgagcacatcgccaccacactcaactaccttttccagcgcctatgcaactatgcggtcttcacccgccacgtggagctcaacctcgcccaggtggtcatgcgcgcgagagatcccgagggggctgtggtctacagccgcgtctggaacgaggcgggcatgaatgcattctctcaactcattggacgcatctccaacgaccttgcggccaccgtcgagagagcgggccgcggagatcttcaagaggaagagatcgagcagttcatggccgagatcgcctaccaggacaactctggcgacgtgcaagaaatccttaggcaagccgccgtcaacgataccgagattgattctgttgaactctctttcaggttcaagctcacggggccggtagcgttcacccagaggcgtcagatccaggatgtcaaccgccgcgtcgtcgcgcatgcaagtcttctcagggcgcagtaccagaacctacccgcgcgcggcgccgacgtaccactgccggccatgccgccgggtcccgagccgcccctgccgcccggtgcgcgccctcgacaccgcttctaaacatgcaagaagcaacagagccaccgccgcccaaacggaaaaacaagggcacggtggtagcgcccaaggggcacggaaccctgcaagccatcgacatctccaccaacggacccgtggagatcaagtaccatctgaacctccctcacgccctcgaaaagatcatgcaagtcaatctcctgacactgcctactaacctgactccgcagcgtctcaggaccctggacagctccgacctgcgcgctctcgtcctcgagctccgcccctgccgcgccgaggtctggacttgcctcccgcgagggctcgtcagcatgaccaccatcgagacagaagatggtcatgccgatgcagacaacatagtagagcgcgaggtacaagcgccaggcctcaattttccactgaaatttctcgtcaaaggaagtcaggtacaactcattcatgaggtgcatcccgtgaatcgatgcgagtactgcggccgtctgtacaagcacaagcatgaatgctcggcgcgtcgcagggagttctacttccatcacatcaacagccattcctccaactggtggcaggagatccagttcttcccgattggctctcatcctcgcacagaaaggctcttcctcacctacgatgtggaaacctacacctggatggggtcctttggcaagcagctaatccccttcatgctggtcatgaaactctctggagaccagcggctcgtcaacatcgcctatgacctggctataaaactcaagtgggatcgctggcagcaggacccccaaaccttctattgcgtcaccccagaaaagatggcagtcgggcagcattttcgtcagtaccgggaccagttacaaacagcactggcagtggacctctggtcctccttcctcaaagcgaaccctcacctgcacgaatgggccctcgaacactatgctctcactgaccctacagacctcacttttgaagaactcaagaagctgcctcatgtcaggggcacacctcgattcttagaactgtacatagtggggcacaacatcaatggctttgatgagatcgtcttggccgctcaggttatcaataaccgagcagaggtccctcagcctttcagaatcacccgaaattttatgcccagggccggcaagatcctcttcaatgatgttactttcgctttgcccaaccccgcctacaagaagcgggtggacttccaactctgggaacagggggcctgtgatgacatcgacttcaagtatcaattcctcaaagtcatggtcagggacacttttgccctcactcatacctcgctgcgcaatgcagcccaagcatactctctcccagtggagaagggatgctgtccctacaaggcagtcaatcaattctacatgttgggctcttaccgtgcagaaaaagacgggtttcccctcgaagagtactggaaggatcgcgaagaataccttctcaaccgcgagctgtgggaaaagaaaaaccaaccgcgttatgacatcatccaggaaactctcgactactgtgccctagacgtacttgtcaccgccgagctggtagccaagctgcaagagtcatatgcccacttcataagggactctgtaggcctccctcatgcccattttaacatattccagagacctactatctcttccaattcccatgccatctttcgccagatcgtttacagggcggaaaaacccaaccgcaccaatctgggcccgggtcttctcgccccctcacatgaactctatgactatgtgcgagcaagcatcagaggggggcgctgttatcccacttacatcggcatcctcgaagagcccctctatgtctacgatatctgtggcatgtatgcctccgcgctcacccaccccatgccctggggcacccctcttaacccctatgagcgcgcgctggcagttcgagaatggcagatgactttggatgatcccgccaccatcagctattttgacaaggatttgctaccgggaatatttaccatagatgcggacccccctgatgagttcatgctagaccccctcccccctttctgttcaagaaaaggaggtcgactctgctggaccaatgagcccctccgaggcgaggtagccaccagtgtggatctgataaccctgcacaataggggatggcgagtcagaatagttccggatgaactgacaaccatcttccctgaatggaaatgtgtggcgcgcgagtacgtccagcttaacatcgccgccaaggagcgcgcggacaaggaaaagaaccaaaccatgcgctctatcgccaagcttctatccaatgccctctatggatcatttgccaccaagctggacaacaagaagattgtgttttctgaccagatggacgagagtcttatgaaaggcatctctgctggtactgtcaatatcaaatcctcctcgttcctagaaactgacaacctgagtgcagaggtcatgcccgccttcgagagggaatacctaccccaacagctggcgctcctggacagcgatccggaagacagtgaagacgaacagaggcccgcccccttttatacccccccggcggggacccctggtcacgtggcctacacttacaagccaatcacattcttggatgtggaggagggggacatgtgtttacataccgtagagaaggtggaccccctggttgacaacgaccgctacccctcccacgtggcctcctttgtgctggcctggacacgcgcttttgtatcagagtgggctgggttcctctacgaagaggaccgcggcactccgctcgaggacaggcccataaagtcagtctacggggacacggacagcctctttgttacccagcggggacacgaactcatggaaaccaaaggtaagaaacgcatcaaaaaacatggcggaaaacttgtttttgaccccgatgagccggatctgacatggctcgtggagtgcgaaaccgtctgcgcctcctgcggtgcggatgcatactcccccgaatccattttcctcgcgcccaagctgtatgccctcaaatgtatctactgccccgcctgccataaaacttccaaaggtaagctccgtgccaaaggccacgcggccgaggcgctcaactacgaactcatggtaaactgctacctggccgacatgcagggcgccgatcggcagcggttctcgaccagcaggatgagtctgaagcgcaccctcgcaagcgcccaaccaggcgcgcaccccttcaccgtgacggaaacaaccctgactcggacgctgcgaccatggaaggatcggaccctggcagcgctggacgcccatcgtctgattccctactccaggagccgtcccaacccgcgaaacgaggaggtctgctggatcgagatgccatagagcacatcaccgagctctgggaccggctcgagctcttgcaacagactctttccaaaatgcccatggctgacgggctgaagccgctgaaaaacttctcctcgctccaggagcttctatcccttgggggagagcgcctcctaacggacttggtgcgggaaaatatccatgtaagggaaatgatgaacgaagtggcccccctgctccgggaggacggcagctgtcgctccctaaactaccatctgcaacccgtaattggggtcatttacggtcccactgggtgcggcaagtctcagctgcttaggaatttgctctcatcccagttaatcaccccggctccagaaacagtattttttatagccccgcaggtggatatgatccccccctctgaactgaaagcctgggaaatgcaaatatgtgagggaaactatgctcccgggccagagggaactttcatcccccaatctggcacccttcgcccaaagtttattaaaatggcttatgatgacctgactcaggagcataactatgatgtttcagacccccggaacgtgttcgcccgtgccgctgcccacggccccatcgctatcattatggatgagtgcatggagaatctggggggtcacaaaggcgtctccaaattttttcatgcttttccctctaagctgcatgataaatttcccaagtgcaccggatacactgtcttggtggttctgcacaatatgaaccccagacgggatctaggcggcaacattgccaacctcaagatccagtccaaaatgcatataatttcaccccggatgcacccgtcccagctcaacagatttgtaaacacctacactaagggcctccccgttgcaattagtctgctcctaaaagatattgtgcaacaccatgcactccgaccttgctatgactgggtgatttataacactaccccggagcaagaggctcttcaatggagctatctccacccccgggacggactaatgcccatgtatctaaacattcaatcccacctttacagggtactggaaaagatccaccgagttctcaatgatcgagaccgatggtccagggcataccgcgcgcgaaaa

SEQ ID NO: 70 - DNA, 4157 bp, Unknown
  Description of Unknown: Human adenovirus 16 sequence
tataaaacgcctggtgatcagaggccgaggtatccagctcaacgacgagtcggttagctcttcgcttggtctgcgaccagacggagtcttccagatcgccggctgtgggagatcttccttcactcctcgtcaggctgtgctgactttggagagttcgtcctcgcagccccgctcgggcggcatcggaactctccagtttgtggaggagtttactccctctgtctacttcaaccccttctccggctctcctggccagtacccggacgagttcataccgaacttcgacgcaatcagcgagtcagtggatggctatgattgatgtctaatggtggcgcggctgagctagctcgactgcgacacctagaccactgccgccgctttcgctgtttcgcccgggaactcaccgagttcatctacttcgaactctccgaggagcaccctcagggtccggcccacggagtgcggattaccatcgaagggggaatagactctcgcctgcatcgcatcttctcccagcggcccgtgctgattgagcgcgaccagggaaatacaaccatctccatctactgcatttgtaaccaccccggattgcatgaaagcctttgctgtcttgtttgtgctgagtttaataaaaactgagttaagaccctcctacggactaccgcttcttcaatcaggactttacaacaccaaccagatcttccagaagacccagacccttcctcctctgatccaggactctaactctaccttaccagcaccctccactactaaccttcccgaaactaacaagcttggatctcatctgcaacaccgcctttcacgaagccttctttctgccaatactaccactcccaaaaccggaggtgagctccgcggtcttcctactgacgacccctgggtggtagcgggttttgtaacgttaggagtagttgcgggtgggcttgtgctaatcctttgctacctatacacaccttgctgtgcatatttagtcatattgtgctgttggtttaagaaatgggggccatactagtcgtgcttgctttactttcgcttttgggtctgggctctgctaatctcaatcctcttgatcacgatccatgtctagacttcgacccagaaaactgcacacttacttttgcacccgacacaagccgtctctgtggagttcttattaagtgcggatgggactgcaggtccgttgaaattacacataataacaaaacatggaacaataccttatccaccacatgggagccaggagttcccgagtggtatactgtctctgtccgaggtcctgacggttccattcgcattagtaacaacactttcattttttctgaaatgtgcgatctggccatgtttatgagcaaacagtatgacctatggcctcctagcaaagagaacattgtggcattttccattgcttattgcttggtaacatgcatcatcactgctatcatttgtgtgtgcatacacttgcttatagttattcgccctagacaaagcaatgaggaaaaagagaaaatgccttaacctttttcctcataccttttctttacagcatggcttctgttacagctctaattattgccagcattgtcactgtcgctcacgggcaaacaattgtccatattaccttaggacataatcacactcttgtagggcccccaattacttcagaggttatttggaccaaacttggaagtgttgattattttgatataatttgcaacaaaactaaaccaatatttgtaatctgcaacagacaaaatctcacgttaattaatgtcagcaaaatttataacggttactattatggttatgatagatccagtagtcaatataaaaattacttagttcgcataactcaacccaaatcaacagtgccaactatgacaataattaaaatggctaataaagcattagaaaattttacattaccaacaacgcccaatgaaaaaaacattccaaattcaatgattgcaattattgcggcggtggcattgggaatggcactaataataatatgcatgttcctatatgcttgttgctataaaaagtttaaacataaacaggatccactactaaattttaacatttaattttttatacagatgatttccactacaatttttatcattactagccttgcagctgtaacttatggccgttcacacctaactgtacctgttggctcaacatgtacactacaaggaccccaagaaggccatgtcacttggtggagaatatatgataatggagggttcgctagaccatgtgatcagcctggtacaaaattttcatgcaacggaagagacttgaccattattaacataacattaaatgagcaaggcttctattatggaaccaactataaaaatagtttagattacaacattattgtagtgccagccaccacttctgctccccgcaaatccactttctctagcagcagtgccaaagcaagcacaattcctaaaacagcttctgctatgttaaagcttcgaaaaatcgctttaagtaattccacagccgctcccaatacaattcctaaatcaacaattggcatcattactgccgtggtagtgggattaataattatatttttgtgcataatgtactacgcctgctgctatagaaaacatgaacaaaaaggtgatgcattactaaattttgatatttaattttttatagaattatgatattgtttcaatcaaataccactaacactatcaatgtgcagactactttaaatcatgacatggaaaaccacactacctcctatgcatacacaaacattcagcctaaatacgctatgcaactaagaaatcaccatactaattgtaattggaattcttatactatctgttattctttattttatattctgccgtcaaatacccaatgttcatagaaattctaaaagacgacccatctattctcctatgattagtcgtccccatatggctctgaatgaaatctaagatctttttttttctcttacagtatggtgaacatcaatcatgattcctagaaatttcttcttcaccatactcatctgtgctttcaatgtctgtgctactttcacagcagtagccactgcaagcccagactgtataggaccatttgcttcctatgcactttttgccttcgttacttgcatctgcgtgtgtagcatagtctgcctggttattaattttttccaactggtagactggatctttgtgcgaattgcctacctacgtcaccatcccgaataccgcaatcaaaatgttgcggcactttttaggcttatttaaaaccatgcaggctatgctgccagtcattttaattctgctcctaccctgcattgccctagcttccaccgccactcgcgctacacctgaacaacttagaaaatgcaaatttcaacaaccatggtcatttcttgattgctaccatgaaaaatctgattttcccacatactggatagtgattgttggaataattaacatactttcatgtacctttttctcaatcacaatataccccacatttaattttgggtggaattctcccaatgcactgggttacccacaagaaccacatgaacatatcccactacaacacatacaacaaccactagcactggtagagtatgaaaatgagccacaaccttcactgcctcctgccattagttacttcaacctaaccggcggagatgactgaaatactcaccacctccaattccgccgaggatctgcttgatatggacggccgcgcctcagaacagcgactcgcccaactacgcatacgccagcagcaggaacgtgccgccaaggagctcagggatgctattgaaattcaccaatgcaaaaaaggcatattttgtttggtaaaacaagccaagatatcctacgagattaccaatactgaccatcgcctctcatacgagctcggaccgcagcgacaaaaattcacttgtatggtgggaatcaaccccataatcatcacccagcaagctggagataccaagggttgcatccactgttcctgcagttccgccgagtgcatctacaccctgctgaagaccctctgcggccttcgagacctcctacccatgaactaatcaacccagcccctcacttaccaattacataaagccaattaataaa

SEQ ID NO: 71 - DNA, 1062 bp, Unknown
  Description of Unknown: Human adenovirus 16 sequence
atggccaaacgagctcggctaagcagctccttcaatccggtctacccctatgaagatgaaagcagctcacaacacccctttataaaccctggtttcatttcctcaaatggttttgcacaaagcccagatggagttctaactcttaaatgtgttaatccactcactaccgccagcggacccctccaacttaaagttggaagcagtcttacagtagatactatcgatgggtctttggaggaaaatataactgccgcagcgccactcactaaaactaaccactccataggtttattaataggatctggcttgcaaacaaaggatgataaactttgtttatcgctgggagatgggttggtaacaaaggatgataaactatgtttatcgctgggagatgggttaataacaaaaaatgatgtactatgtgccaaactaggacatggccttgtgtttgactcttccaatgctatcaccatagaaaacaacaccttgtggacaggcgcaaaaccaagcgccaactgtgtaattaaagagggagaagattccccagactgtaagctcactttagttctagtgaagaatggaggactgataaatggatacataacattaatgggagcctcagaatatactaacaccttgtttaaaaacaatcaagttacaatcgatgtaaacctcgcatttgataatactggccaaattattacttacctatcatcccttaaaagtaacctgaactttaaagacaaccaaaacatggctactggaaccataaccagtgccaaaggcttcatgcccagcaccaccgcctatccatttataacatacgccactgagaccctaaatgaagattacatttatggagagtgttactacaaatctaccaatggaactctctttccactaaaagttactgtcacactaaacagacgtatgttagcttctggaatggcctatgctatgaatttttcatggtctctaaatgcagaggaagccccggaaactaccgaagtcactctcattacctcccccttctttttttcttatatcagagaagatgactga

SEQ ID NO: 72 - DNA, 360 bp, Unknown
  Description of Unknown: Human adenovirus 16 sequence
gatggagttctaactcttaaatgtgttaatccactcactaccgccagcggacccctccaacttaaagttggaagcagtcttacagtagatactatcgatgggtctttggaggaaaatataactgccgcagcgccactcactaaaactaaccactccataggtttattaataggatctggcttgcaaacaaaggatgataaactttgtttatcgctgggagatgggttggtaacaaaggatgataaactatgtttatcgctgggagatgggttaataacaaaaaatgatgtactatgtgccaaactaggacatggccttgtgtttgactcttccaatgctatcaccatagaaaacaacacc

SEQ ID NO: 73 - DNA, 573 bp, Unknown
  Description of Unknown: Human adenovirus 16 sequence
ttgtggacaggcgcaaaaccaagcgccaactgtgtaattaaagagggagaagattccccagactgtaagctcactttagttctagtgaagaatggaggactgataaatggatacataacattaatgggagcctcagaatatactaacaccttgtttaaaaacaatcaagttacaatcgatgtaaacctcgcatttgataatactggccaaattattacttacctatcatcccttaaaagtaacctgaactttaaagacaaccaaaacatggctactggaaccataaccagtgccaaaggcttcatgcccagcaccaccgcctatccatttataacatacgccactgagaccctaaatgaagattacatttatggagagtgttactacaaatctaccaatggaactctctttccactaaaagttactgtcacactaaacagacgtatgttagcttctggaatggcctatgctatgaatttttcatggtctctaaatgcagaggaagccccggaaactaccgaagtcactctcattacctcccccttctttttttcttatatcagagaagatgac

SEQ ID NO: 74 - DNA, 3633 bp, Unknown
  Description of Unknown: Human adenovirus 16 sequence
atgaggagacgagccgtgctaggcggagcggtggtgtatccggagggtcctcctccttcttacgagagcgtgatgcagcaacaggcggcgatgatacagcccccactggaggctcccttcgtaccccctcggtacctggcgcctacggaagggagaaatagcattcgttactcggagctgtcaccccagtacgataccaccaagttgtatctggtggacaacaagtcggcggacatcgcctccctgaactatcagaacgaccacagcaacttcctgaccacagtggtgcagaacaatgactttacccccacggaggctagcacccagaccattaactttgacgagcggtcgcggtggggcggtcagctgaagaccattatgcacaccaacatgcccaacgtgaacgagtacatgttcagcaacaagtttaaggcgagggtgatggtatctaggaaggctcctgaaggtgttacagtaaatgatcataaagatgatattttgaaatatgagtggtttgagttcactttaccagaaggtaacttctcagctaccatgaccatcgacctgatgaacaatgccatcattgacaactacctgaaaattggcagacagaatggagtgctggaaagtgacattggtgttaagtttgacactagaaacttcaggctcgggtgggaccccgaaactaagttgattatgccaggggtctacacttatgaggcattccatcctgacattgttttgttgcctggttgcggggtagattttactgaaagccgacttagcaacttgcttggcatcaggaagagacatccattccaggagggtttcaaaatcatgtatgaagatcttgaagggggtaatattcctgcccttttggatgtcactgcctatgaggaaagcaaaaaggataccactactgaaacaggcgaaaaggcggtggttaaaacaaccacagtggctgttgcagaggaaaccagtgaagatgataatataactagaggagatacttatataactgaaaaacaaaaacgtgaagctgcagctgcagaactattacttatgtctgaagttaaaaaagagttaaagatccaacctttagaaaaagacagcaagaatagaagctacaatgtcttggaagacaaaatcaacacagcctaccgcagctggtacctgtcctacaattatggtaaccctgagaaaggaataaggtcctggacactgctcaccacttcggatgtcacctgtggagccgagcaggtctactggtcgctccccgacatgatgcaagaccccatcaccttccgctcctcgagacaagtcaacaactacccagtagtgggtgcagagcttatgccggtcttctcaaagagtttctacaatgagcaagccgtgtactctcagcagctccgacagtccacctcgctcacgcacgtcttcaaccgcttccctgagaaccagatcctcatccgcccgccggcgcccacaattaccaccatcagtgaaaacgttcctgctctcacagatcacgggaccctgccgttacgcagcagtatccggggagtccagcgcgtgaccgttactgacgccagacgtcgcacctgtccctacgtttacaaggccctgggcatagtcgcgccgcgcgttctttcaagccgcactttctaaaaaaaaaaaaaaatgtccattctcatctcgcccagtaataataccggttggggactgcatgcgcccaccaagatgtacggaggcgcccgcaaacgctctacccagcaccccgtgcgcgttcgcggtcatttccgcgctccctggggcgccctcaagggccgtacccgcactcggaccacggtcgatgatgtgatcgaccaggtggttgccgatgctcgtaattatactcctactgcgcctacatctactgtggatgcagttattgacagtgtagtggcagacgctcgcgcctatgctcgccggaagagccgaaggaggcgcatcgccaggcgccacagggctactcccgctatgcgagctgcaaaagctattctgcggagggccaaacgtgtgggacgaagagccatgcttagagcggccagacgcgcggcttctggtgctagcagcggcaggtcccgcaggcgcgcggccacggcggcagcagcggccattgccaacatggcccaaccgcgaagaggcaatgtgtattgggtgcgcgatgccactaccggccagcgcgtgcccgtgcgcacccgcccccctcgcacttagaagatactgagcagtctccgatgttgtgtcccagcggcaagtatgtccaagcgcaaatacaaggaagagatgctccaggtcatcgcgcctgaaatctacggtccgccgatgaaggatgaaaaaaagccccgcaaaatcaagcgggttaaaaaggacaaaaaagaagaagatggcgatgatggactggtggagtttgtgcgcgagttcgcgccaagacggcgcgtgcagtggcgcggtcgaaaagtacgccaagtgcttagacccgggaccactgtggtctttacacctggcgagcgttccagcactacttttaaacggtcctatgatgaggtgtatggggatgacgatattattgagcaggcggcagaccgccttggcgagtttgcttatggcaagcgcacaagatccagtcccaaagaggaggcggtatctattcccttggatcatggaaatcccacccctagcctcaaaccagtcaccctgcagcaagtgctgcccgtacctgcgagcagaggcgtaaagcgcgagggtgaggacctatatcccaccatgcagctaatggtgcccaagcggcagagattagaagacgtactggagaaaatgaaagtggatgccgatatccagcctgaggtgaaagtgagacccatcaaggaagtggcgccaggtttgggagtacaaacctttgacatcaagattcccactgagtccatggaagtgcagaccgaacctgcaaaacccacagtcacctcaattgaggttcagacggaaccctggatgcccgcgcccgttgccgcccccagcaccactagaagatcacgtcgaaagtatggcccagcaagtctgctaatgcccaactatgctctgcacccatccatcattcccactccgggttacagaggcactcgctactatcgaagtcggagcaacacctcacgccgccgcaaactacctgcaagtcgcactcgccgtcgccgccgccgcaccactgccagcaaattaactcccgccgccctggtgcggagagtgtaccgcgatggtcgcgctgaacctctgacgctgccgcgcgcgcgctatcatccaagcatcaccacttaatgactgttgacgctgcctccttgcagatatggctctcacttgccgccttcgcgtccccattactggctaccgaggaagaaactcgcgccgtagaaggatgttggggcgagggatgcgccgccacagacgaaggcgcgctatcagcaagcgattagggggtggctttctgccagctcttatacccatcatcgccgcggcgatcggggcgataccaggcatagcttccgtggcggttcaggcctcgcagcgccactaacaatggaaaaatttataaataaa

SEQ ID NO: 75 - DNA, 2823 bp, Unknown
  Description of Unknown: Human adenovirus 16 sequence
atggccaccccatcgatgatgccccaatgggcatacatgcacatcgccggacaggatgcttcggagtacctgagtccgggtctggtgcagttcgcccgtgcaacagacacctacttcagtatggggaacaagtttagaaaccccacagtggcgcccacccacgatgtgaccaccgaccgtagccagcgactaatgctgcgcttcgtgcccgttgaccgggaagacaatacctactcttacaaagttcgctacacgctggctgtaggggacaacagagtactggatatggccagcacgttctttgacatccgcggcgtgctggaccggggccctagcttcaaaccctactccgggaccgcctacaacagcctggctcccaagggagcgcccaacacctgccagtggaaggattctgacagcaaaatgcatacctttggggtagctgccatgcccggtgttactgggaaaaagatagaagctgatgggctgcctattggaatagattcaacttctggaactgacacagtaatttatgctgataaaactttccaaccagaaccacaagttggaaatgccagttgggttgacgccaatggtacagaggaaaaatatggaggcagagctctgaaggacactacaaagatgaaaccctgctatggttctttcgccaagcctaccaacaaagaaggtggtcaggctaacttaaaagattcagaaaccgccgccaccactcctaactatgatatagatctggctttctttgacaacaaaaatattgctgctaactacgatccagatattgtaatgtacacagaaaatgttgacttgcagactccagatactcatattgtatacaaacctggaacagaggacaccagctctgaatccaatttgggtcagcaagccatgcctaacagacccaactacattggcttcagagacaattttattgggctcatgtactacaacagcactggcaatatgggggtgctggccggtcaggcctctcagctgaatgctgtggttgacttgcaagacagaaacactgaactgtcctaccagctcttgcttgactctctgggtgacagaacccggtatttcagtatgtggaatcaggcggtggacagctatgatcctgatgtgcgtattattgaaaaccatggtgtggaggacgaattgccaaactattgctttccgttgaatggtgtgggatttacagacacttaccaaggtgttaaagttaaaacagatgcagttgctggaaccagtggaacacagtgggacaaagatgacaccacagttagtactgctaatgaaatccatggaggcaatccttttgccatggaaatcaacatccaagccaatctatggcgaagtttcctttattccaatgtggctttgtatctcccagactcgtataaatacaccccgtccaatgtcactctcccagaaaacaaaaacacctacgactacatgaacgggcgggtggtgccgccatctctagtagacacctatgtgaacattggtgccaggtggtctctggatgccatggacaatgtcaacccattcaaccaccaccgtaacgctggcttgcgttaccgatccatgcttctgggtaacggacgttatgtgcctttccacatacaagtgcctcaaaaattcttcgctgttaaaaacctgctgcttctcccaggctcctacacttatgagtggaactttaggaaggatgtaaacatggttctacagagttcccttggtaacgacctacgggtagatggcgccagcatcagtttcacgagcatcaatctttatgctacttttttccccatggctcacaacaccgcttccacccttgaagccatgctgcggaatgacaccaatgatcagtcattcaacgactacctatctgcagctaacatgctctaccccatacctgccaacgcaaccaatattcccatttccattccttctcgcaactgggcggctttcagaggctggtcatttaccagactgaaaaccaaagaaactccctctttggggtctggatttgacccatactttgtctattccggttctattccctacctggatggtaccttctatctaaatcacacttttaagaaggtttccatcatgtttgactcttcagtgagctggcctggaaatgacaggttactatctcctaacgaatttgaaataaagcgcactgtggatggcgaaggctacaacgtagcccaatgcaacatgaccaaagactggttcttggtacagatgctcgccaactacaacattggctaccagggcttttacatccctgagggatacaaggatcgcatgtactcctttttcagaaacttccagcctatgagcaggcaggtggttgatgaggttaattacactgactacaaagccgtcaccttaccatatcaacacaacaactctggctttgtaggataccttgcgcctactatgagacaaggggaaccttacccagccaattatccatacccgctcatcggaactactgccgttaagagtgttacccaaaaaaagttcctgtgcgacaggaccatgtggcgcataccgttctccagcaacttcatgtccatgggggcccttacagacctgggacaaaacctgctctatgccaactcggcccatgcactggacatgacttttgaggtggatcccatggatgagcccaccctgctttatcttcttttcgaagtcttcgacgtggtcagagtgcaccagccacaccgcggcgtcatcgaggccgtctacctgcgcacaccgttctcggccggcaacgccaccacataa

SEQ ID NO: 76 - protein, 353 aa, Unknown
  Description of Unknown: Human adenovirus 16 sequence
MAKRARLSSSFNPVYPYEDESSSQHPFINPGFISSNGFAQSPDGVLTLKCVNPLTTASGPLQLKVGSSLTVDTIDGSLEENITAAAPLTKTNHSIGLLIGSGLQTKDDKLCLSLGDGLVTKDDKLCLSLGDGLITKNDVLCAKLGHGLVFDSSNAITIENNTLWTGAKPSANCVIKEGEDSPDCKLTLVLVKNGGLINGYITLMGASEYTNTLFKNNQVTIDVNLAFDNTGQIITYLSSLKSNLNFKDNQNMATGTITSAKGFMPSTTAYPFITYATETLNEDYIYGECYYKSTNGTLFPLKVTVTLNRRMLASGMAYAMNFSWSLNAEEAPETTEVTLITSPFFFSYIREDD

SEQ ID NO: 77 - protein, 130 aa, Unknown
  Description of Unknown: Human adenovirus 16 sequence
DGVLTLKCVNPLTTASGPLQLKVGSSLTVDTIDGSLEENITAAAPLTKTNHSIGLLIGSGLQTKDDKLCLSLGDGLVTKDDKLCLSLGDGLITKNDVLCAKLGHGLVFDSSNAITIENNTLWTGAKPSAN

SEQ ID NO: 78 - protein, 181 aa, Unknown
  Description of Unknown: Human adenovirus 16 sequence
CVIKEGEDSPDCKLTLVLVKNGGLINGYITLMGASEYTNTLFKNNQVTIDVNLAFDNTGQIITYLSSLKSNLNFKDNQNMATGTITSAKGFMPSTTAYPFITYATETLNEDYIYGECYYKSTNGTLFPLKVTVTLNRRMLASGMAYAMNFSWSLNAEEAPETTEVTLITSPFFFSYIREDD

SEQ ID NO: 79 - protein, 555 aa, Unknown
  Description of Unknown: Human adenovirus 16 sequence
MRRRAVLGGAVVYPEGPPPSYESVMQQQAAMIQPPLEAPFVPPRYLAPTEGRNSIRYSELSPQYDTTKLYLVDNKSADIASLNYQNDHSNFLTTVVQNNDFTPTEASTQTINFDERSRWGGQLKTIMHTNMPNVNEYMFSNKFKARVMVSRKAPEGVTVNDHKDDILKYEWFEFTLPEGNFSATMTIDLMNNAIIDNYLKIGRQNGVLESDIGVKFDTRNFRLGWDPETKLIMPGVYTYEAFHPDIVLLPGCGVDFTESRLSNLLGIRKRHPFQEGFKIMYEDLEGGNIPALLDVTAYEESKKDTTTETGEKAVVKTTTVAVAEETSEDDNITRGDTYITEKQKREAAAAELLLMSEVKKELKIQPLEKDSKNRSYNVLEDKINTAYRSWYLSYNYGNPEKGIRSWTLLTTSDVTCGAEQVYWSLPDMMQDPITFRSSRQVNNYPVVGAELMPVFSKSFYNEQAVYSQQLRQSTSLTHVFNRFPENQILIRPPAPTITTISENVPALTDHGTLPLRSSIRGVQRVTVTDARRRTCPYVYKALGIVAPRVLSSRTF

SEQ ID NO: 80 - protein, 940 aa, Unknown
  Description of Unknown: Human adenovirus 16 sequence
MATPSMMPQWAYMHIAGQDASEYLSPGLVQFARATDTYFSMGNKFRNPTVAPTHDVTTDRSQRLMLRFVPVDREDNTYSYKVRYTLAVGDNRVLDMASTFFDIRGVLDRGPSFKPYSGTAYNSLAPKGAPNTCQWKDSDSKMHTFGVAAMPGVTGKKIEADGLPIGIDSTSGTDTVIYADKTFQPEPQVGNASWVDANGTEEKYGGRALKDTTKMKPCYGSFAKPTNKEGGQANLKDSETAATTPNYDIDLAFFDNKNIAANYDPDIVMYTENVDLQTPDTHIVYKPGTEDTSSESNLGQQAMPNRPNYIGFRDNFIGLMYYNSTGNMGVLAGQASQLNAVVDLQDRNTELSYQLLLDSLGDRTRYFSMWNQAVDSYDPDVRIIENHGVEDELPNYCFPLNGVGFTDTYQGVKVKTDAVAGTSGTQWDKDDTTVSTANEIHGGNPFAMEINIQANLWRSFLYSNVALYLPDSYKYTPSNVTLPENKNTYDYMNGRVVPPSLVDTYVNIGARWSLDAMDNVNPFNHHRNAGLRYRSMLLGNGRYVPFHIQVPQKFFAVKNLLLLPGSYTYEWNFRKDVNMVLQSSLGNDLRVDGASISFTSINLYATFFPMAHNTASTLEAMLRNDTNDQSFNDYLSAANMLYPIPANATNIPISIPSRNWAAFRGWSFTRLKTKETPSLGSGFDPYFVYSGSIPYLDGTFYLNHTFKKVSIMFDSSVSWPGNDRLLSPNEFEIKRTVDGEGYNVAQCNMTKDWFLVQMLANYNIGYQGFYIPEGYKDRMYSFFRNFQPMSRQVVDEVNYTDYKAVTLPYQHNNSGFVGYLAPTMRQGEPYPANYPYPLIGTTAVKSVTQKKFLCDRTMWRIPFSSNFMSMGALTDLGQNLLYANSAHALDMTFEVDPMDEPTLLYLLFEVFDVVRVHQPHRGVIEAVYLRTPFSAGNATT

SEQ ID NO: 81 - DNA, 114 bp, Unknown
  Description of Unknown: Human adenovirus 21 sequence
ctatctatataatataccttatagatggaatggtgccaatatgcaaatgaggtaatttaaaaaagtgcgcgctgtgtggtgattggctgcggggtgaacggctaaaaggggcgg

SEQ ID NO: 82 - DNA, 114 bp, Unknown
  Description of Unknown: Human adenovirus 21 sequence
ccgccccttttagccgttcaccccgcagccaatcaccacacagcgcgcacttttttaaattacctcatttgcatattggcaccattccatctataaggtatattatatagatag

SEQ ID NO: 83 - DNA, 365 bp, Unknown
  Description of Unknown: Human adenovirus 21 sequence
gcaatgctgggaggtgacgtaacttatgtaggaggagttatgttgcaagttatcgcggtaaaggtgacgtaaaacgaggtgtggtttggacacggaagtagacagttttcccacgcttactgacaggatatgaggtagttttgggcggatgcaagtgaaaattctccattttcgcgcgaaaactgaatgaggaagtgaatttctgagtcatttcgcggttatgacagggtggagtatttgccgagggccgagtagactttgaccgtttacgtggaggtttcgattaccgtgtttttcacctaaatttccgcgtacggtgtcaaagtcctgtgtttttacgtaggtgtcagctgatcactagggta

SEQ ID NO: 84 - DNA, 3432 bp, Unknown
  Description of Unknown: Human adenovirus 21 sequence
tttaaacctgtcgagttccgtcaagaggccactcttgagtgccagcgagaagagttttctcctccgcgctgcgagtcagttttgcgctttgaaaatgagacacctgcgattcctgccacaggagattatctccagcgagaccgggatcgaaatactggagtttgtggtaaataccctgatgggagatgacccggaaccgccagtgcagcctttcgatccacctacgctgcacgatctgtatgatttagaggtagacgggcctgatgatcccaatgaggaagctgtaaatgggttttttactgattctatgctgctagctgccgatgaaggattggacataaaccctcctcctgggacccttgataccccaggggtggttgtggaaagcggcagaggtgggaaaaaattgcctgatctgggagcagctgaaatggacttgcgttgttatgaagagggttttcctccgagtgatgatgaagatggggaaactgaacagtccatccataccgcagtgaatgagggagtaaaagctgccagcgatgtttttaagttggactgtccggagctgcctggacatggctgtaagtcttgtgaatttcacaggaataacactggaatgaaagaactattgtgctcgctttgctatatgagaatgcactgccactttatttacagtaagtgtatttaagtgaaatttaaaggaatagtgtagctgtttaataactgttgaatggtagatttatgtttttacttgcgattttttgtaggtcctgtgtctgatgatgaggcgccttctcctgattcaactacctcacctcctgaaattcaggcgcccgtacctgcaaacgtatgcaagcccattcctgtgaagcctaagtgtgggaaacgccctgctgtggataagcttgaggacttgttggagggtggggatggacctttggaccttagtacccggaaactgccaagacaatgagtgccctgcagctgtgtttatttaatgtgacgtcatgtaataaaattatgtcagctgctgagtgttttattgcttcttgggtggggacttggatatataagtaggagcagatctgtgtggttagctcatagcaacctgctgccatccatggaggtttgggctatcttggaagacctgagacagactaggctactgctagaaaacgcctcggacggagtctctggcttttggagattctggttcggtggtgatctagctaggctagtgtttaggataaaacaggactacagggaagaatttgaaaagttattggacgacagtccaggactttttgaagctcttaacttgggccaccaggctcattttaaggagaaggttttatcagttttagatttttctactcctggtagaactgctgctgctgtagcttttcttacttttatattggataaatggatccgccaaacccacttcagcaagggatacgttttggatttcatagcagcagctttgtggagaacatggaaggctcgcaggatgaggacaatcttagattactggccagtgcagcctctgggagtagcagggatactgagacacccaccggccatgccagcggttctggaggaggagcagcaggaggacaatccgagagccggcctggaccctccggtggaggagtagctgacctgtttcctgaactgcgacgggtgcttactaggtctacgtccagtggacaggacaggggcattaagagggagaggaatcctagtgggaataattcaagaaccgagttggctttaagtttaatgagccgtaggcgtcctgaaactgtttggtggcatgaggttcagagcgaaggcagggatgaagtttcaatattgcaggagaaatattcactagaacaacttaagacctgttggttggaacctgaggatgattgggaggtggccattaggaattatgctaagatatctctgaggcctgataaacagtatagaattactaagaagattaatattagaaatgcatgctacatatcagggaatggggcagaggttataatagatacccaagataaagcagcttttagatgttgtatgatgggtatgtggccaggggttgtcggcatggaagcagtaacatttatgaatattaggtttaaaggggatgggtataatggcattgtatttatggctaacactaagctgattctacatggttgtagcttttttgggtttaataatacttgtgtagaagcttgggggcaagttggtgtgaggggttgtagtttttatgcatgctggattgcaacatcaggtagggtcaagagtcagttgtctgtgaagaaatgcatgtttgagagatgtaatcttggcatactgaatgaaggtgaagcaagggtccgccactgcgcagctacagaaactggctgcttcattctaataaagggaaatgccagtgtgaagcataatatgatctgtggacattcgaatgagaggccttatcagatgctgacctgcgctggtggacattgcaatattcttgctaccgtgcatatcgtttcccatgcacgcaagaaatggcctgtatttgaacataatgtgattaccaagtgcaccatgcacataggtggtcgcaggggaatgtttatgccttaccagtgtaacatgaatcatgtgaaggtgatgttggaaccagatgccttttccagagtgagcttaacaggaatctttgatatgaatattcaactatggaagatcctgagatatgatgacactaaaccgagggtgcgcgcatgcgaatgcggaggcaagcatgctagattccagccggtgtgcgtggatgtgactgaagacctgagacccgatcatttggtgcttgcctgcactggagcggagttcggttctagtggtgaagaaactgactaaagtgagtagtggggcaatatgtggatggggactttcaggttggtaaggtggacagattgggtaaattttgttaatttctgtcttgcagctgccatgagtggaagcgcttcttttgaggggggagtatttagcccttatctgacgggcaggctcccatcatgggcaggagttcgtcagaatgtcatgggatccactgtggatgggagacccgtccagcccgccaattcctcaacgctgacctatgccactttgagttcgtcatcattggatgcagctgcagccgccgccgctactgctgccgccaacaccatccttggaatgggctattacggaagcatcgttgccaattccagttcctctaataacccttcaaccctggctgaggacaagctgcttgttctcttggctcagctcgaggccttaacccaacgcttaggcgaactgtctaagcaggtggcccagttgcgtgagcaaactgagtctgctgttgccacagcaaagtctaaataaagatctcaaatcaataaa

SEQ ID NO: 85 - DNA, 19688 bp, Unknown
  Description of Unknown: Human adenovirus 21 sequence
atggccagccgcggaggaaatcagtcaagcgaccgccaacgggagcacacccccgaacgcggaatgggctctgccagccatccgcctccaaggccggaccgcagcccatctcagtcgcctccacctctgcccccgaagaggaacacctaccgtcgcgtggggtccgattcttctatcgagagccaggtggtactggtaagcgaaacttcgcggtcatccctgtctccggaacggagcaacagtcctcccccgatccctcccaagaagaagcccaggaagaccaagcatgtccctctgcaagacatcagccaggacagcgaagaagaaagagaacaggctcagttggtggccgtgggcttcagctaccccccggtgcgcatcattgagaaggatggcaagagaagtgttgagaagatcgacaagaatgaccctatagctaaaggagctacttctattgctgttaggaatcctttgagcttgcccctggtatctgcctgggagaagggcatggaagtgatggctgtgctaatggagaggtataggctggataatgacctgagaacctctttcaagctgatgccagagcagcacgagcagtacaagcgtatctgccaccagtatgtgaacgaggagcaccgtggcatcccgctgacatttagtagcatgaagaccctgacagcgatgatgggaagattcatgcagggattggtgcattcttattctgagatcgcccacaataattgggagtgcaccgggtgcgctctgtgggctcatggatgcaccgattacgaaggcaaggtgaaatgcctgcatggcactattatgatccagaaggaccacattatcgagatggatgtggcgagcgaaaacgggcagcgcgctatgaaggagaacccagacagagccaagatcacccagaaccgctggggcagaaatgtggtccagttggccaacaacgatgcccgctgctgtgtgaatgatgccaactgtgctactaaccaattttccagcaagtcctgtgggatgttttacaccgagggaagtaaggctcaggaagctttcaagcagtacgaagccttcatgaaggccgtgtacccagggataacccccgaccaagccaggatgatgctgatccccattcattgcgattgcaaccacaagccaggctgcgctcccgtgatgggcaggcagacctgtaagatgaccccctttggaatggccaatgctgaagacttggatgtgactaccatcagtgacccgaccgtgctggcaagcgtgagacacccagccttgatggtgttccagtgttgcaacccagtgtaccgcaactcccgtgtccagaatgccggccccaactgtgatttcaagatctctgctcctgacctgcttggcgccctgcaactgaccagaaagttgtggcaagacacctttcccgaaattccagttcccaagctggtgatccccgagttcaagtggcagaacaggttacagttccgcaacgtctccctgcccacgggtcactctgactcacgccagaacccatttgatttctgagtgaatgatgaaaacgaatgagcaaaaaaccagagccttagtgcatgtaaaaataaagtgctttttattgaacacggttttacatgacttattgcatatccatacggtcaaacgcggtggccctttcgatgcgtgcgcggtgagaacgaaagtaagatgagtgggtgtttaggaagcgatatagcgcctcctggttgcgacgcagggtgggctggacttggggtgattggagcatgctgtttgacaccccagtcagcaacttcatggtggggtttccgttcatggggcggtcgggccagtgcacaaaggcatgaaggaacatacagcaaaaaagtccacaggcggctgagcgcgggccctgcacgctctgggtggacttttccagggtgatgcagcggtctttggtagcaagggcactgcggcgcaggagcccctcgtactcaaactggtaaatctgtttgagtcgctcatccgagaacccaaaaggatcaaaaaggtagcaggtgttggagcgcgggttccaaccaaaagccagccagtgctctccccccgtctcgcgtccggcagtgttgactatggcgcaggcgagcttgtcgggggccatgaaccccgggaaacgcttgtcaaaggttcccaggaaatagggtccgcagcccaggtctcggacgatggctttgagctcttgctcgctggagccgtttccggacccgcatgacatggctgcagctgctgcttgcaagaagcaagaggcttcttatgtggtggcgttgccggccgagaacggtgtgcgcaggtagacggcctcgatgacgccgcggtgtggctggtgcactctgaccacgtcgaagacttcgaaaagaagataaagcagggtgggctcatccatgggatccacctcaaaagtcatgtccagcgcatgggccgagttggcatacagcaagttctgtcccaggtctgtaagggcacccatggacatgaagttgctagagaatgggatgcgccacatggtcctgtcgcacaggaattttttctgggtgacactggttactgcagtggttccaattagggggtatgggtagttagcagggtacgcttgaccctgacgcatggtaggagccatgtaacccacaaagccagagttattatgctggtagggtacggcgacagctttatagtctttgtagttaatctcatcaaccacctgtctactcatgggctggaagtttctgaagaaggagtacatgcgatccttgtaaccctcaggaacgtagaagccctggtatccaatgttgtagttggcaagcatctggaccaggaaccagtctttggtcatgttacattgggccacattgtagccttccccatcaactgtgcgcttgatttcgaactcatttggacttagcaatctgtcattaccaggccagctcactgaagagtcaaacatgatggagactttcttgaaagtgtggttaaggtagaaggtaccatccaggtagggtatagaaccagagtaaacaaagtagggatcgaaccctgatcccaaagagggagtctccttggttttgagtctggtgaaggaccagcctctgaaggcggcccagttgcgagagggaatggagatgggaacgttggtagcgttggccgggatggggtagagcatgttggcagcagaaaggtagtcattgaatgattgatcattggtgtcattgcgcagcatggcttcaagggtggaggcagtgttgtgggccatggggaagaaggtggcatagagattgatgctggtaaaacttatgctggcaccatcgacccggagatcattaccaagggaactctgcaggaccatgttcacatcctttctgaagttccactcgtaggtgtaagaaccgggtagaagcagcaggttcttcacagcaaagaatttctgaggcacttgaatgtggaaaggcacgtaacgaccattgcccaaaagcatggaccggtatcgcaggccagcgttgcggtgatggttaaaggggttgacattgtccatggcatccaaagaccatctggcgccaatgtttacgtaggtatccaccagggatgggggaaccacccgcccattcatgtagtcataagtgttggtgttagttggaagagtgacattggctggggtgtatttgtaggagtctgggagatacagagccacattggaataaagaaaacttctccagagattagcttggaggttaatttccatggcaaagagatttccttgtccaatttcacttgttccatttatgtcaggctctttccaatctgcaccctgtccgtttggttcaattattttgtaactacttattggtacccctactccatccaatggaaagcagtagttgggaagctcatcttccaccccatgattttcaataatgcgcacatcaggatcatagctatcgactgcttgattccacatgctgaagtatctggttctgtcacccagagagtcaagcagtagttgatatgatagttctgtgtttctgtcctgcaagtcaaccaccgcattcaattgggatgcttgacctgccagcactcccatgttgccagtactgttgtagtacataagtccaataaagttatctctaaagccaatgtagttgggtctgttgggcatagattgttgacccagattagcatgagaactttcttctgaagtaccaggtttgtacaccacatgagtgtctggggtttccaagtctacattttctgcatacatcacaatttttggactgaagtttgctttctgtgacgcttcatcaaaaaagttcatgtcaatatcatattcaacctgctggttttgcggttgttcagtagttttttgttttgcctgtccgcctttgacgttagtgggtttagcaaaagacccatagcagggtttcattttagtttctggctttagagctctaccaccatacttctcagttgttccatctgtgtcagtccaagtttcatctcccacctgaggttctggttggtatagtttatctgcataaattggtttggcttcgccgtctgtaatttctgaaccaattggaagacctttgtctttagtgatatcaccaccttctgctttcactggggcatttccaaaagtgtaagtggtgagatttttctcttcctcttcgtcagatcccccatcttctttttttacgccttcagcaatccactgagatgtattgggagcgcccttaggggccaacgagttgtaagcagtgccagagtatggcttgaagctagggcctctatccaacacaccccgaatgtcaaagaaagtgctggccatatccagcactctgttgtcgcccacagccaaggtgtatcgaactttgtatgcgtaggtattgtcttcccggtcaacgggcacaaagcgcagcatcagccgctgactgcggtcggtggtcacatcatgggtgggcgccacggtggggttcctaaacttgttccccagattgaagtaggtgtctgtggcgcgggcgaactgcaccagacccggactcaggtactccgaagcatcctgtccggcgatgtgcatgtatgcccactggggcagcatcgatggggtggccatcttgaaatcaactcagcctcggcgcgcgacctcttccttgctcctctgctgttgctgcggcggcggcgtgatgatgacacatacacacagacaggcaagttaagcgctactccatattaatttaaaagcagcgacggcgctttacactttgcacgcccagacccacgatgctgttcagagtactctgccagtttgcattcggacgtggagtgcccccaggacgcggtctggctacggcgacgggctgtacggtggtgggcttcggggtagcgacaggcttgcgagcaggcgctgcaacagcagggggaggcaagtccaaggtagcgggtcggtgtgactgagaaggtttcattaccccggtagccatgggggctacaggtctggtggtgggcattccaagcttcactgcctcctcgtaggagggcgggtcgtctgagcgtgtgactagtgtctcctccagatcggggcgcggacgcttgtcgccccgcttttcaaggggagggagatcttcctccacttccatttcacccggggctgacggcggcgggtcaatgcggctgtttatctgtttctgcacggcctggttggccagatccaccaccccattgataccagaggcgattccatcaaccaccttctgttggaagttttgctctttaagcttatttctcaatgcctgccctgtgctgctgttccaagctttgttcccataggtttttatggtagagccaaaatttttaagcccgctccagatactgctccaattgaaggcgcccccgttcagttggctggtgccgatgtcgctccaggtgcccatgtacggcctcgtgccgtgtcgcggagccagggatgaaaaattgatgtcttccatctctacaaaaacatagtcacaggaccaggagcatcagagtccattctgttttatttataagtttttccaatgtcagtggcgctgcgaggcctgaaccgccacggaagctatgcctggtatcgccccgatcgccgcggctatgatggggatcagagcaggcagaaagccaccccccagcctcttgctgatagcgcgccgccgcctgtggcgtcgcattccgcgccccaacatccctcttctacggcgcgagtttcttcctcggtagccagtaatggggacacgaaggcggcaagtgagggccatatctgcaaggaggcagcggcaacagttgttaagttgtgatgcttggatggtagcgtacgcgcggcaacgtcaggggatccgcgcggccatcgcgatacactctccgcaccagagcagcgggagtcagattgctggtggggcggcggcgacgacggtgactacgacttgcaggtgttttgcggcgacggcgggaagtgctgctcctgctgcggtagtagcgagtgcctcggtaacccggagttggaataatggatgggtgcagagcataatttggcatcagcaaacttgctggaccgtactttcgccgggatcttcgagtggtgttgacagcagctggagttgtaacgggtgcggtcatccagggatccgtttgcacctcaatggaggtggttgtgggctttgcaggttcggtttggacttccatggactcggtgggaatcttgatgtctacggtttgtactcccaaacctggcgccacctgcttgatgggtctcactttgacctcaggttgtatatcgggatccactttcattttctccagcacgtcctccagccgctggcgcttgggcaccatcaattgcatagtgggatacagatcctcaccctctcgcttgttgcctctgcgtggaggcacgggcagcacttgctgcagggtgactggcttgagactaggggtgggattcccattgtccaagggaatggacaccgcctcctccttggggctcgagcgggagcgcttgccataagcaaactcgcccaggcggtcggccgcctgctccagaatatcatcatccccatacacctcatcataggaccgcttaaaagcagtgctggagcgctcgccgggcgtaaagaccaccgtggttccaggtctcagcacaggccgcactttgcgtccacgccactgcacacgccgccttggggcgaactcgcgtacaaactccgccagaccatcattgccatcttcttcctttttgtcctttttgacccgcttgattttgcggggctttttttcatccttcaccggcggaccgtagatttcaggcgcgatgacctggagcatctcttccttgtatttgcgcttggacatcctcgctgggacacaacatcggagactgctcagtatcttctaagagcgaggggggcgggtgcgcacgggcacgcgctggccggtggtggcgtcgcgcacccagtacacattgcctcttcgcggttgggccatgttggcaatggccgctgctgccgccgtggctgcgcgcctgcgggacctgccggcactggcacctgaagccgcgcgtctggccgctctaagcatagctcttcgccccacgcgtttggccctccgtagcagagctcttgccgctcgcatagcgggagtagcccggtggcgcctggcgatgcgtctccgcctgctcttccggcgagcataggcgcgggcgtcagccactacgctgtcaataactgcatccacagtagatgtaggtgcagtaggagtataattacgagcatcggccaccacctggtcgatcacatcatcgacggtggttctagtgcgggcacgacccttgagggcgccccatggagcgcggaagtgcccgcgcacgcgcacagggtgctgtgtagagcgtttgcgagcacctccgtacatcttgcttggcgcgcgcaggccccaaccggtgttattactaggtgagataagaatggacatttttttttttagaaagtgcggcttgaaaggacgcgcggcgcgactatgcccagggccttgtagacgtaggggcaggtgcggcgtctggcgtcagtaacggtcacgcgctggactccccggatactgctgcgcaacggcagggtcccgtgatctgtgagagcaggaacgttttcactgacggtggtaatggtgggcgctggcgggcggatgaggatctggttctcagggaagcggttgaagacgtgcgtgagcgaggtggactggcgaagctgctgggagtacacggcttgctcgttgtagaaactctttgagaagaccggcatgagctctgcacctaccactggatagttgctgacttgtctcgtggaacggaatgtgacagggtcctgcatcatgtctgggagcgaccagtacacctgctctgctccacaggtgacatccgaggtggtgagcagtgtccaggaacggactcctttttcagggtcaccatagttgtaggacaggtaccagctgcggtaggctgtattcactttatcttccaagacattgtaacttctactcttgctgtctttttctacaggtttaatagtgagttttgtctctgtagtttcggccacagcagccaatagcgattcgtcagttgcaacagatgaagctgtatagttgtctcctctgacttcttctgcattagccacccttacagggtcgctgacaactatgttggctttagcaatagcagcagctttagcggcttctgttttggcttcttgttctttcttactgttctcataggcttctacatccaacagggccgggatattacccccttcaagatcctcatacaagatcttaaaaccctcctggaatgggtgtcttttcctgataccaagcaagttactaaggcgactttcagtaaagtcaactccgcaaccaggcaacaatacaatgtcaggatggaatgcctcataggtgtaaaccccaggcataatcaacttagtttccggatcccaacccagtctaaagttcctggtgtcaaatttaacaccaatgtcactctctaacactccattctgtctgcccacttcaaggtaattatcaatgatggcattgttcattaggtcaatggtcattgtggctgagaaattcccttccggtagagtaaactcaaaccactcatattccaaaatatcctgcttgtgatcataattgtcatctactgtgacaccttcaggagcctttctagacaccatcacccgagctttgaacttgttgctaaacatgtactcgttcacgttgggcatgttggtgtgcatgatagtcttcagctgaccgccccatcgcgaccgctcgtcaaagttgatggtctgggtgctggcctccgtgggggtaaagtcattgttttgcaccaccgtggtgaggaagttgctgtggtcgttctgatagttcagtgaggcgatgtccgcggacttgttgtccaccaaatacaaccgggtggtatcatacaatggtgccagctccgagtaacgaatgctgtttctcccctccgtaggtgccaggtaccgagggggtacaaagggagcctccagtggtggctgcatcgtcgccgccgccgcctgctgcatcacgctctcgtacgaaggaggaggaccctccggatacaccaccgctccgcctagcacggttcgcctcatcatactagatataacagagaagaaacgaacgcacgctggtcgccatggccttggtgagtatttattttcggtttcttacatcaggcgcccgacgcgggggcgcaggtgagcgaacgggttaccaccactcccacccaagtccaacacgctgctgtcgtcggcggaatcatcatcggcccacaccaggccccgctgcctgtcgtgccactggcgtttacgggtagcgctgccccggctatcccccagcgcccggggatcgtgcgcgtacgtcttccagcggttcattttgtcaaccaagctttctatcccgttgttggggaaattcttctccctctcgggtctcaacagggagtcgttcaaatactcctcctcgccgatcaagcgaggacgggttattcttcccagctcactgctgcgtacactgtttagcgaaaatggcaaactagggaaaggacttgcggcctcgggagccgctgcggcagcacccgttgccccggacagtgacacggaagagtgccttctatcgccaccttccttcttccaagtgttataaccaggaggcggggagaaaacactactgtccacatcgtcccataaaaacccgtcattgggtcgggcaatgtcatactcgcccgtatagaacccaggtgggggcagccaatgggggttcaggatagcattggtgaaataatcagagttcatagcagccgccctgtgtaagtagtctagcagtttattgataaaaggccggttactggcatacatgctgggctccatgtttcgggctgtcatatcgagcgcagcagtaggagtcgccccctcctgcattaggaacagtcccacgctctgctgcacgtatctcaggatccgttcctcctccgcggtaagcgcatactgaggagggatcttctgcgaccggttggtcagcaagaagtttaaggtggcttccaagctgccagtgtcctcccgacccagagcgcggctcacttgggtaatttcttgataggtttgctcatctacctgagtttgccctatggcctcgcgatacaggttcaacagatagcccaagtacgaattacggtcgatgctaccgctgtcagtgaatggggctaccaagagcagtagtaggcgggagttgggggtcagcaagctagacacggtcgcccgatctcccactggggcgcgcactccccacagaccattcaggttcttaaaagcctggctcaggttcactgtctgcaagccctgtctgctggtctggaaaaagtagtctggcccggactggtacacttcgctttgagggacttcggccaccatgagtctcaatgcacttagaaagtttgtgtagtcttgctgaccgcgaggcacgttggcaggctgagtgctgaggaaggcgttcaaagccaccagcgaccctaaattggcgtctcgctggaaccgctcgcgctgagacacggcctcgcgcacatcggtcaccatccggtccaggttggtctgcacgttgctgctgttgtagcgggctacgcgctccaatagggcattgtataccagcccagcctcatcgggacgtatggctttgttctccaccagcgcgttcacgatggccaggaccttctcgtgtgtggggttggagcgggagggcactacggcctccaggatagcagaaaggcggttggcctggggttgctgcctaaaggcttcggggttgcgggtcgtcagcgccatgatgcgttgcatggcctggctccaatcgtccgaggagttaatgccggacggctggctctgtagcgccgcccgttttgcggggtccggtgcctgctgttccatctagcaaaaatatggatggtcgcgccatcagtcttccaggtactcgccctcctcatcctggccttcatccacctcttctatgtaaggaagctcataccctgctgcgtccagggccctgcgactgggctgccattgcaagtccgctcccatgtcaaagtagttctccccctcggttccagccccagtcagagctctttgcaagctgtgcataagttctctgtcgctcagctcacgccttctgctggcgctcactgcgcggtgcatcctgtcgttgcggtacactcccagatcgtcactcaaggtcagcaccttgagagtcatgcgcatataaaacccatctatcttcacctccttgtctataggtacgtatggggttttgtagatcttgcgagcgtagtgcttgcccaggctcaagaccgagtagttaatagcagccaccttctcagctagacccaggctacgttcttgcactattatactttgcagaatattgataagatcatacaaccatctcccctcgggctcagtaatgttcaacagcgcctccctaaatgcctcattgtctctactatgttgcaccaccagaaacagctgagcggttagaggtttgctggtggggttctgggtaatggcttccatcaggtcccacaggtgcatcagtcccagtgtcacttcctcgcgggcaatcagggtgcgcacatggttgttgaaagatttttgaaagttgcgctcctccttcacggtctgctcgtaagctgatactaggttggccgcggccacatgtgccctagcaggacttattcctgtcacttcatcgacttcaaaatcatcatcacgcagcacccgtcttcggtccagaccgtgacgcagttcgcgacccgcgttaaagcgggaagctcgcatttcctcaggctcctcgccgctcctgtccctgaacaggttctgctggggcacgtacgcctcgcgagagtcctttttcagttgcacccgcgggtgccgctcgggcgatggtgcgcccaggcgcgccagtccctcgccctcttccaagtccagatcataggcgggctgccccgcgccgctgacggctgcagccgcagtagttacaggagcaggaagagccttttgtggctgttgttgtagctgctgctgagaagggggctgttgctgggggcgcatctgtcgcagcacgggatgcatctgggcaacaaaaaaacaaaaaaagagggctcgctcccgtaaactggagaagtcggctggcggggtcttagaaatgacggggctgccaaaccctcgcttgtcgcggaaaccggccgatccggcgcgctaagactcgaaccggggcacaccgcaacgcaaccctggcgattgattctccagactacgggcgcgagccactcccagccccgagaactgagtgttctaaagcttgacgcagcactggctcccatccaggaaaaagcaaaaaaaaaaaaaaacgacccgcctccgtatcctggaggttttgtgcaggcctgggtcgagacgggagtgccagtaccacgttagctgcggctccagcctgatccgagattcgaaccggggtacacgcgcagcccaacccgttcgcttagcctccaggccacggagacgagccgctgaccgctttcgtttttgcccgtatgtctagagcatcaacgactgtgcacgtctcacgggccaaaccgtgcctaccatgaactacttcatgccgctgcgcaacatctggaaccgcgtacgcgagttcccgcgggcatccaccaccgcctccggtatcacctggatgtccaggtacatctacggttatcaccgcctcatgctggaagacctcgcccctggcgccccggctacagagcgatggcccctataccgccagccgccgccgcactttcttatcggctaccagtacctggtgcgcacctgtaacgattacatctttgacacccgcgcctactcgcgcctcaagtacaccgagattgtgcgtccggggcaccagacagtcaactggtcagtcatggccaactgctcctacacaatcaacaccggggcttaccaccgcttcgtggactttgacgacttccaagccaccctcacccaggtgcagcaagccatcctcgcagaaagggttgtagcggacctggcacttgtccagcccatgcgcgggttcgggatcactcgcatgcatggcagagcgggcgaagaagaagtgcccgtggaacgactcatgcaagactactataaagatctggccagatgtcaggataatgcttggggaatggcccatcgcctgcgcatccaacaagccggacccaaagacctggtgctcctcgccaccatccgccgtctcaaaactgcctattttaatttcatcaccagcagcatcgtctcaccctccaaagaggaggaaggagaagaaagagagaaccccgaccgagcgtctagccgcccccgcccgcaagaaacagtgctcagcctaccttgcgattgcgactggttagacgctttcgtcgaaaggttttcagatcccgtggatcttgagacgatcaggtccttgcgcggagtacctacggggcaattgataaaatgcataatcagcgcggtgtccctgcccaacggagagcctcccagtcaccacttcagggagatgcgcggaggcgtcttcactctgagacccagggagaacggtcgtgccgtcaccgagaccatgcgccgccgccgcggagaggtcattgaaagattcatcgaccgtctgcccgtgcgccgccggcgtcgccgcgttccccctcctcctgcagccccacctgaagaggaagagatgttagtggaagaagaagagattgaggaagaaatcccaggggctttcgagcgcgaggtgcgcaccaccgtcgccgaactcatccgtcttctggaagaggagttgaccgtgtccgcgcgtaactcccagtttttcaactttgccgtggacttctacgaggccatggagcgcttggaagcgctgggcgatgtcagcgagatgccgctgagacgatggatcatgtatttcttcgtcaccgagcacatcgccaccacactcaactaccttttccagcgtctatgcaactatgcggtcttcacccgccacgtggagctcaacctcgcccaggtggtcatgcgcgcgagagatcccgtgggggctgtggtctacagccgcgtctggaacgaggcgggcatgaatgcattctctcaactcattgggcgcatctccaacgacctggcggccaccgtcgagagagcgggccgcggagatcttcaagaggaagagatcgagcagttcatggccgagatcgcctaccaggacaactctggcgacgtgcaagaaatccttaggcaagccgccgtcaacgataccgagattgattctgttgaactctctttcaggttcaagctcacggggccggtagctttcacccagaggcgtcagatccaggatgtcaaccgccgcgtcgtcgcgcatgcgagtcttctcagagcacagtaccagaacctacccgcgcgcggcgccgacgtaccactgccagccatgccgccgggtcccgaaccgcccctgccgcccggtgcgcgccctcgacaccgcttctaaacatgcaagaagcaacagagccaccgccgcccaaaaggaaaaacaagggcacggtggtagcacccaaggggcacggaaccctgcaagccatcgacatctccaccaacggacccgtggagatcaagtaccatctgaacctccctcacgccctcgaaaagatcatgcaagtcaatctcctgacactgcctactaacctgactccgcagcgtctcaggaccctggacagctccggcctgcgcgctctcgtcctcgagctccgcccctgccgcgccgaggtctggacttgcctcccgcgagggctcgtcagcatgaccaccatcgagacagaagatggtcatgccgatgcagacaacatagtagagcgcgaggtacaaacgccaggcctcaattttccactgaaatttctcgtcaaaggaagtcaggtacaactcattcatgaggtgcatcccgtgaatcgctgcgagtactgcggccgtctgtacaagcacaagcatgaatgctcggcgcgtcgcagggagttctacttccatcacatcaacagccattcctccaactggtggcaggagatccagttcttcccgattggctctcatcctcgcacagaaaggctcttcctcacctacgatgtggaaacctacacctggatggggtcctttggcaagcagctaatccccttcatgctggtcatgaaactctctggagaccagcggctcgtcaacatcgcctatgacctcgccatgaaactcaagtgggatcgctggcggcaggacccccaaaccttctattgcgtcaccccagaaaagatggcagtcgggcagcattttcgtcagtaccgggaccagttacaaacagcactggcagtggacctctggtcctccttcctcaaagcgaaccctcacgtgcacgaatgggccctcgaacactatgctctcactgaccctacagatctcacttttgaagaactcaagaagctgcctcatgtcaggggcacccctcgattcttagaactgtacatagtggggcacaacatcaatggctttgatgagatcgtcttggccgctcaggttatcaataaccgagcagaggtccctcagcctttcaaaatcacccgaaatttcatgcccagggccggcaagatcctcttcaatgatgttactttcgctttgcccaaccccgcctacaagaagcgggtggacttccaactctgggaacagggggcctgtgatgacattgacttcaagtatcaattcctcaaagtcatggtcagggacacttttgccctcactcatacctcgctgcgcaatgcagcccaagcatactctcttccagtggagaagggatgctgtccctacaaggcagtcaatcagttctacatgttgggctcttaccgtgcagaaaaagacgggtttcccctcgaagagtactggaaggatcgcgaagaataccttctcaaccgcgagctgtgggaaaagaaaagccaaccgcgttatgacatcatccaggaaactctcgactactgtgccctggatgtactcgtcaccgccgagctggtagccaagctgcaagagtcatatgcccacttcataagggactctgtaggcctacctcatgcccattttaacatattccagagacctactatctcttccaattcccatgccatctttcgccagatcgtttacagggcggaaaaacccaaccgcaccaatctgggcccgggtcttctcgccccctcacatgaactctatgactatgtgcgagcaagcatcagaggggggcgctgttatcccacttacatcggcatcctcgaagagcccctctatgtctacgatatctgtggcatgtatgcctccgcgctcacccaccccatgccctggggcacccctcttaacccctatgagcgcgcgctggcagttcgagaatggcagatgaccttggatgatcccgccaccatcagctattttgacaaagatttgctaccgggaatatttaccatagatgcggacccccctgatgagttcatgctagaccccctcccacctttctgttcaagaaaaggaggtcgactctgctggaccaatgagcccctccgaggcgaggtggccaccagtgtggatctgataaccctgcacaataggggatggcgagtcagaatagttccggatgaactgacaaccatcttccctgaatggaaatgtgtggcgcgcgagtacgtccagcttaacatcgccgccaaggagcgcgcggacaaggaaaagaaccaaaccatgcgctccatcgccaagcttctgtccaatgccctttatggatcatttgccaccaagctggacaacaagaagattgtgttttctgaccagatggacgagagtcttatgaaaggcgtctctgctggtactgtcaatatcaaatcctcctcgttcctagaaactgacaacctgagtgcagaggtcatgcccgccttcgagagggaatacctaccccaacagctggcgctcctggacagcgatcctgaagacagtgaggacgaacagaggcccgcccccttttatacccccccggcggggacccctggtcacgtggcctacacttacaagccaatcacattcttggatgtggaggagggggacatgtgtttacataccgtagagaaggtggacccactggttgacaacgaccgctacccctcccacgtggcctcctttgtgctggcctggacacgcgcttttgtatcagagtgggctgggttcctctacgaagaggaccgaggcactccgctcgaggacaggcccataaagtcggtctacggggacacggacagcctctttgtcacccagcggggacacgaactcatggaaaccaaaggtaagaaacgcatcaaaaaacatggcggaaaacttgtttttgaccccgatgagccggatctgacctggctcgtggagtgcgaaaccgtctgcgcctcctgcggtgcggatgcatactcccccgaatccattttcctcgcgcccaagctgtatgccctcaaatgtatctactgccccgcctgccataaaacttccaaaggtaagctccgtgccaaaggccacgcggccgaggcgctcaactacgaactcatggtaaactgctacctggccgacctgcagggcgccgatcggcagcggttctcgaccagcaggatgagtctgaagcgcaccctcgcaagcgcccaaccaggcgcgcaccccttcaccgtgacggaaacaaccctgactcggacgctgcgaccatggaaggatcggaccctagcagcgctggacgcccatcgtctgattccctactccaggagccgtcccaacccgcgaaacgaggaggtctgttggatcgagatgccatagagcacatcaccgagctctgggaccggctcgagctcttgcaacagactctttccaaaatgcccatggctgacgggctgaagccgctgaaaaacttctcctcgctccaggagcttctatcccttgggggagagcgcctcctaacggacttggtgcgggaaaatatccatgtaagggaaatgatgaacgaagtggcccccctgctccgggaggacggcagctgtcgctccctaaactaccatctgcaacccgtaattggggtcatttacggtcccactgggtgcggcaagtctcagctgcttaggaatttgctctcatcccagttaatcaccccggctccagaaacggtattttttatagccccgcaggtggacatgatccccccctcggaactgaaagcctgggaaatgcaaatatgtgagggaaactatgctcccgggccagagggaactttcatcccccaatctggcaccctccgcccaaagtttattaaaatggcttatgatgacctgactcaggagcataactatgatgtttcagacccccggaacgtgttcgcccgtgccgctgcccacggccccatcgctatcattatggatgagtgcatggagaatctggggggtcacaaaggcgtctccaaattttttcatgcttttccctctaagctgcatgataaatttcccaagtgcaccggatacactgtcttggtggttctgcacaatatgaatccgagacgggatctaggcggcaacattgccaacctcaagatccagtccaaaatgcatataatttcacccaggatgcacccgtcccagctcaacagatttgtaaacacctacactaagggcctccccgttgcaattagtctgctcctaaaagatattgtgcaacaccatgcactccgaccttgctatgactgggtgatttataacactaccccggagcaagaggctcttcaatggagctatctccacccccgagacggactaatgcccatgtatctaaacattcaatcccacctttacagggtactggaaaagatccaccgagttctcaatgatcgagaccgatggtccagggcataccgcgcgcgaaaaatcaaataaacattcatttgtttttataaca

SEQ ID NO: 86 - DNA, 3768 bp, Unknown
  Description of Unknown: Human adenovirus 21 sequence
atgtctaatggtggcgcggctgagctagctcgactgcgacacctagaccactgccgccgctttcgctgtttcgcccgggaactcaccgagttcatttacttcgaactctccgaggagcaccctcagggtccggcccacggagtgcggattaccatcgaagggggaatagactctcgcctgcatcgcatcttctcccagcggcccgtgctgattgagcgcgaccagggaaatacaaccatctccatctactgcatctgtaaccaccccggattgcatgaaagcctttgctgtcttgtttgtgctgagtttaataaaaactgagttaagaccctcctacggactaccgcttcttcaatcaggactttacaacaccaaccagatcttccagaagacccagacccttcctcctctgatccaggactctaactctaccttaccagcaccctccactactaaccttcccgaaactaacaagcttggatctcatctgcaacaccgcctttcacgaagccttctttctgccaatactaccactcccaaaaccggaggtgagctccgcggtcttcctactgacgacccctgggtggtagcgggttttgtaacgttaggattagttgcgggtgggcttgtgctaatcctttgctacctatacacaccttgctgtgcatatttagtcatattgtgctgttggtttaagaaatgggggccatactagtcgtgcttgctttactttcgcttttgggtctgggctctgctaatctcaatcctcttgatcacgatccatgtctagacttcgacccagaaaattgcacacttacttttgcacccgacacaagccgtctctgtggagttcttattaagtgcggatgggactgcaggtccgttgaaattacacataataacaaaacatggaacaatacattatccaccacatgggaaccaggagttcccgagtggtatactgtctctgtccgaggtcctgacggttccattcgcattagtaacaacactttcattttttctgaaatgtgcgatctggccatgtttatgagcaaacagtatgacctatggcctcctagcaaagagaacattgtggcattttccattgcttattgcttggtaacatgcatcatcactgctatcatttgtgtgtgcatacacttgcttatagttattcgccctagacaaagcaatgaggaaaaagagaaaatgccttaacctttttcctcataccttttctttacagcatggcttctgttacagctctaattattgccagcattgtcactgtcgctcacgggcaaacaattgtccatattaccttaggacataatcacactcttgtagggcccccaattacttcagaggttatttggaccaaacttggaagtgttgattattttgatataatttgcaacaaaactgaaccaatatttgtaatctgtaacagacaaaatctcacgttaattaatgttagcaaaatttataacggttactattatggttatgatagatccagtagtcaatataaaaattacttagttcgcataactcagcccaaatcaacagtgccaactatgacaataattaaaatggctaataaagcattagaaaattttacattaccaacaacgcccaatgaaaaaaacattccaaattcaatgattgcaattattgcggcggtggcattgggaatggcactaataataatatgcatgttcctatatgcttgttgctataaaaagtttcaacataaacaggatccactactaaattttaacatttaattttttatacagatgatttccactacaatttttatcattactagccttgcagctgtaacttatggccgttcacacctaactgtacctgttggctcaacatgtacactacaaggaccccaagaaggctatgtcacttggtggagaatatatgataatggagggttcgctagaccatgtgatcagcctggtacaaaattttcatgcaacggaagagacttgaccattattaacataacattaaatgagcaaggcttctattatggaaccaactataaaaatagtttagattacaacattattgtagtgccagccaccacttctgctccccgcaaatccactttctctagcagcagtgccaaagcaagcacaattcctaaaacagcttctgctatgttaaagcttcgaaaaatcgctttaagtaattccacagcagctcccaatacaattcctaaatcaacaattggcatcattactgccgtggtagtgggattaatgattatatttttgtgcataatgtactacgcctgctgctatagaaaacatgaacaaaaaggtgatgcattactaaattttgatattgtttcaatcaaatgccactaacactctcaatgtgcagactactttaaaacatgacatggaaaaccacactacctcctatgcatacacaaatattcagcctaaatacgctatgcaacttagaaatcaccatactaattgtaattggaattcttacactatctgttattctttattttatattctgccgtcaaatacccaatgttcatagaaattctaaaagacgtcccatctattctcctatgattagtcgtccccatatggctctgaatgaaatctaagatctttttttttcttttacagtatggtgaacatcaatcatgattcctagaaatttcttcttcaccatactcatctgtgctttcaatgtctgtgctactttcacagcagtagccactgcaagcccagactgtataggaccatttgcttcctatgcactttttgcctttgttacttgcatctgcgtgtgtagcatagtctgcctggttattaattttttccaactggtagactggatctttgtgcgaattgcctacctacgtcaccatcccgaataccgcaatcaaaatgttgcggcacttcttaggcttatttaaaaccatgcaggctatgctaccagttattttaattctgctactaccctgcattgccctaccttccaccgccactcgcgctacacctgaacaacttagaaaatgcaaatttcaacaaccatggtcatttcttgattgctaccatgaaaaatctgattttcccacatactggatagtgattgttggaataattaacatactttcatgtaccgttttctcaatcacaatataccccacatttaattttgggtggaattctcccaatgcactgggttacccacaagaactagatgaacatatcccactacaacacatacaacaaccactagcattggtagagtatgaaaatgagccacaaccttcactgcctcctgctattagttacttcaacctaaccggcggagatgactgaaatactcaccacctccaattccgccgaggatctgcttgatatggacggccgcgcctcagaacagcgactcgcccaactacgcatccgccagcagcaggaacgcgtgaccaaagagctcagagatgtcatccaaattcaccaatgcaaaaaaggcatattttgtttggtaaaacaagccaagatatcctacgagatcaccgctactgaccatcgcctttcttacgaacttggcccccaacgacaaaaatttacatgcatggtgggaatcaaccctatagttatcacccagcaaagtggagatactaagggttgcattcactgctcttgcgattccaccgagtgcacctacaccctgctgaagaccctatgcggcctaagagacctgctacccatgaattaa

SEQ ID NO: 87 - DNA, 972 bp, Unknown
  Description of Unknown: Human adenovirus 21 sequence
atgaccaagagagtccggctcagtgattccttcaaccctgtctacccctatgaagatgaaagcacctcccaacacccctttataaacccagggtttatttccccaaatggctttacacaaagcccagacggagttcttactttaaattgtttaaccccactaacaaccacaggcgggcctttacagttaaaagtgggagggggacttatagtggatgacactgatgggaccttacaagaaaacatacgtgctacagcacccattactaaaaataatcattctgtagaactatccattggaaatggattagaaacacaaaacaataaactatgtgccaaattgggaaatgggttaaaatttaacaacggtgacatttgtataaaggatagtattaacaccttatggactggaataaagcctccacctaactgtcaaattgtggaaaacactgatacaaacgatggcaaacttactttagtattagtaaaaaacggagggcttgttaatggctacgtatctctagttggtgtatcagacactgtgaaccaaatgttcacacaaaagtcagcaaccatacaattaagattatatttcgactcttctggaaatctattaactgatgaatcaaacttaaaaattccacttaaaaataaatcttctacagcaaccagtgaagctgcaaccagcagcaaagcctttatgccaagtactacagcttatccctttaacaccactactagggatagtgaaaactatattcatggaatatgttactatatgactagttatgatagaagtctagttcccttaaacatttctataatgctaaacagccgtacgatttcttccaatgttgcctatgccatacaatttgaatggaatctaaatgcaaaagaatctccagaaagcaacatagctacgctgaccacatccccctttttcttttcttatattagagaagacgacaactaa

SEQ ID NO: 88 - DNA, 273 bp, Unknown
  Description of Unknown: Human adenovirus 21 sequence
gacggagttcttactttaaattgtttaaccccactaacaaccacaggcgggcctttacagttaaaagtgggagggggacttatagtggatgacactgatgggaccttacaagaaaacatacgtgctacagcacccattactaaaaataatcattctgtagaactatccattggaaatggattagaaacacaaaacaataaactatgtgccaaattgggaaatgggttaaaatttaacaacggtgacatttgtataaaggatagtattaacacc

SEQ ID NO: 89 - DNA, 570 bp, Unknown
  Description of Unknown: Human adenovirus 21 sequence
ttatggactggaataaagcctccacctaactgtcaaattgtggaaaacactgatacaaacgatggcaaacttactttagtattagtaaaaaacggagggcttgttaatggctacgtatctctagttggtgtatcagacactgtgaaccaaatgttcacacaaaagtcagcaaccatacaattaagattatatttcgactcttctggaaatctattaactgatgaatcaaacttaaaaattccacttaaaaataaatcttctacagcaaccagtgaagctgcaaccagcagcaaagcctttatgccaagtactacagcttatccctttaacaccactactagggatagtgaaaactatattcatggaatatgttactatatgactagttatgatagaagtctagttcccttaaacatttctataatgctaaacagccgtacgatttcttccaatgttgcctatgccatacaatttgaatggaatctaaatgcaaaagaatctccagaaagcaacatagctacgctgaccacatccccctttttcttttcttatattagagaagacgacaac

SEQ ID NO: 90 - DNA, 1686 bp, Unknown
  Description of Unknown: Human adenovirus 21 sequence
atgatgaggcgaaccgtgctaggcggagcggtggtgtatccggagggtcctcctccttcgtacgagagcgtgatgcagcaggcggcggcggcgacgatgcagccaccactggaggctccctttgtaccccctcggtacctggcacctacggaggggagaaacagcattcgttactcggagctggcaccattgtatgataccacccggttgtatttggtggacaacaagtccgcggacatcgcctcactgaactatcagaacgaccacagcaacttcctcaccacggtggtgcaaaacaatgactttacccccacggaggccagcacccagaccatcaactttgacgagcggtcgcgatggggcggtcagctgaagactatcatgcacaccaacatgcccaacgtgaacgagtacatgtttagcaacaagttcaaagctcgggtgatggtgtctagaaaggctcctgaaggtgtcacagtagatgacaattatgatcacaagcaggatattttggaatatgagtggtttgagtttactctaccggaagggaatttctcagccacaatgaccattgacctaatgaacaatgccatcattgataattaccttgaagtgggcagacagaatggagtgttagagagtgacattggtgttaaatttgacaccaggaactttagactgggttgggatccggaaactaagttgattatgcctggggtttacacctatgaggcattccatcctgacattgtattgttgcctggttgcggagttgactttactgaaagtcgccttagtaacttgcttggtatcaggaaaagacacccattccaggagggttttaagatcttgtatgaggatcttgaagggggtaatatcccggccctgttggatgtagaagcctatgagaacagtaagaaagaacaagaagccaaaacagaagccgctaaagctgctgctattgctaaagccaacatagttgtcagcgaccctgtaagggtggctaatgcagaagaagtcagaggagacaactatacagcttcatctgttgcaactgacgaatcgctattggctgctgtggccgaaactacagagacaaaactcactattaaacctgtagaaaaagacagcaagagtagaagttacaatgtcttggaagataaagtgaatacagcctaccgcagctggtacctgtcctacaactatggtgaccctgaaaaaggagtccgttcctggacactgctcaccacctcggatgtcacctgtggagcagagcaggtgtactggtcgctcccagacatgatgcaggaccctgtcacattccgttccacgagacaagtcagcaactatccagtggtaggtgcagagctcatgccggtcttctcaaagagtttctacaacgagcaagccgtgtactcccagcagcttcgccagtccacctcgctcacgcacgtcttcaaccgcttccctgagaaccagatcctcatccgcccgccagcgcccaccattaccaccgtcagtgaaaacgttcctgctctcacagatcacgggaccctgccgttgcgcagcagtatccggggagtccagcgcgtgaccgttactgacgccagacgccgcacctgcccctacgtctacaaggccctgggcatagtcgcgccgcgcgtcctttcaagccgcactttctaa

SEQ ID NO: 91 - DNA, 2850 bp, Unknown
  Description of Unknown: Human adenovirus 21 sequence
atggccaccccatcgatgctgccccagtgggcatacatgcacatcgccggacaggatgcttcggagtacctgagtccgggtctggtgcagttcgcccgcgccacagacacctacttcaatctggggaacaagtttaggaaccccaccgtggcgcccacccatgatgtgaccaccgaccgcagtcagcggctgatgctgcgctttgtgcccgttgaccgggaagacaatacctacgcatacaaagttcgatacaccttggctgtgggcgacaacagagtgctggatatggccagcactttctttgacattcggggtgtgttggatagaggccctagcttcaagccatactctggcactgcttacaactcgttggcccctaagggcgctcccaatacatctcagtggattgctgaaggcgtaaaaaaagaagatgggggatctgacgaagaggaagagaaaaatctcaccacttacacttttggaaatgccccagtgaaagcagaaggtggtgatatcactaaagacaaaggtcttccaattggttcagaaattacagacggcgaagccaaaccaatttatgcagataaactataccaaccagaacctcaggtgggagatgaaacttggactgacacagatggaacaactgagaagtatggtggtagagctctaaagccagaaactaaaatgaaaccctgctatgggtcttttgctaaacccactaacgtcaaaggcggacaggcaaaacaaaaaactactgaacaaccgcaaaaccagcaggttgaatatgatattgacatgaacttttttgatgaagcgtcacagaaagcaaacttcagtccaaaaattgtgatgtatgcagaaaatgtagacttggaaaccccagacactcatgtggtgtacaaacctggtacttcagaagaaagttctcatgctaatctgggtcaacaatctatgcccaacagacccaactacattggctttagagataactttattggacttatgtactacaacagtactggcaacatgggagtgctggcaggtcaagcatcccaattgaatgcggtggttgacttgcaggacagaaacacagaactatcatatcaactactgcttgactctctgggtgacagaaccagatacttcagcatgtggaatcaagcagtcgatagctatgatcctgatgtgcgcattattgaaaatcatggggtggaagatgagcttcccaactactgctttccattggatggagtaggggtaccaataagtagttacaaaataattgaaccaaacggacagggtgcagattggaaagagcctgacataaatggaacaagtgaaattggacaaggaaatctctttgccatggaaattaacctccaagctaatctctggagaagttttctttattccaatgtggctctgtatctcccagactcctacaaatacaccccagccaatgtcactcttccaactaacaccaacacttatgactacatgaatgggcgggtggttcccccatccctggtggatacctacgtaaacattggcgccagatggtctttggatgccatggacaatgtcaacccctttaaccatcaccgcaacgctggcctgcgataccggtccatgcttttgggcaatggtcgttacgtgcctttccacattcaagtgcctcagaaattctttgctgtgaagaacctgctgcttctacccggttcttacacctacgagtggaacttcagaaaggatgtgaacatggtcctgcagagttcccttggtaatgatctccgggtcgatggtgccagcataagttttaccagcatcaatctctatgccaccttcttccccatggcccacaacactgcctccacccttgaagccatgctgcgcaatgacaccaatgatcaatcattcaatgactacctttctgctgccaacatgctctaccccatcccggccaacgctaccaacgttcccatctccattccctctcgcaactgggccgccttcagaggctggtccttcaccagactcaaaaccaaggagactccctctttgggatcagggttcgatccctactttgtttactctggttctataccctacctggatggtaccttctaccttaaccacactttcaagaaagtctccatcatgtttgactcttcagtgagctggcctggtaatgacagattgctaagtccaaatgagttcgaaatcaagcgcacagttgatggggaaggctacaatgtggcccaatgtaacatgaccaaagactggttcctggtccagatgcttgccaactacaacattggataccagggcttctacgttcctgagggttacaaggatcgcatgtactccttcttcagaaacttccagcccatgagtagacaggtggttgatgagattaactacaaagactataaagctgtcgccgtaccctaccagcataataactctggctttgtgggttacatggctcctaccatgcgtcagggtcaagcgtaccctgctaactacccataccccctaattggaaccactgcagtaaccagtgtcacccagaaaaaattcctgtgcgacaggaccatgtggcgcatcccattctctagcaacttcatgtccatgggtgcccttacagacctgggacagaacttgctgtatgccaactcggcccatgcgctggacatgacttttgaggtggatcccatggatgagcccaccctgctttatcttcttttcgaagtcttcgacgtggtcagagtgcaccagccacaccgcggcgtcatcgaggccgtctacctgcgcacaccgttctcggccggcaacgccaccacataa

SEQ ID NO: 92 - protein, 323 aa, Unknown
  Description of Unknown: Human adenovirus 21 sequence
MTKRVRLSDSFNPVYPYEDESTSQHPFINPGFISPNGFTQSPDGVLTLNCLTPLTTTGGPLQLKVGGGLIVDDTDGTLQENIRATAPITKNNHSVELSIGNGLETQNNKLCAKLGNGLKFNNGDICIKDSINTLWTGIKPPPNCQIVENTDTNDGKLTLVLVKNGGLVNGYVSLVGVSDTVNQMFTQKSATIQLRLYFDSSGNLLTDESNLKIPLKNKSSTATSEAATSSKAFMPSTTAYPFNTTTRDSENYIHGICYYMTSYDRSLVPLNISIMLNSRTISSNVAYAIQFEWNLNAKESPESNIATLTTSPFFFSYIREDDN

SEQ ID NO: 93 - protein, 91 aa, Unknown
  Description of Unknown: Human adenovirus 21 sequence
DGVLTLNCLTPLTTTGGPLQLKVGGGLIVDDTDGTLQENIRATAPITKNNHSVELSIGNGLETQNNKLCAKLGNGLKFNNGDICIKDSINT

SEQ ID NO: 94 - protein, 190 aa, Unknown
  Description of Unknown: Human adenovirus 21 sequence
LWTGIKPPPNCQIVENTDTNDGKLTLVLVKNGGLVNGYVSLVGVSDTVNQMFTQKSATIQLRLYFDSSGNLLTDESNLKIPLKNKSSTATSEAATSSKAFMPSTTAYPFNTTTRDSENYIHGICYYMTSYDRSLVPLNISIMLNSRTISSNVAYAIQFEWNLNAKESPESNIATLTTSPFFFSYIREDDN

SEQ ID NO: 95 - protein, 561 aa, Unknown
  Description of Unknown: Human adenovirus 21 sequence
MMRRTVLGGAVVYPEGPPPSYESVMQQAAAATMQPPLEAPFVPPRYLAPTEGRNSIRYSELAPLYDTTRLYLVDNKSADIASLNYQNDHSNFLTTVVQNNDFTPTEASTQTINFDERSRWGGQLKTIMHTNMPNVNEYMFSNKFKARVMVSRKAPEGVTVDDNYDHKQDILEYEWFEFTLPEGNFSATMTIDLMNNAIIDNYLEVGRQNGVLESDIGVKFDTRNFRLGWDPETKLIMPGVYTYEAFHPDIVLLPGCGVDFTESRLSNLLGIRKRHPFQEGFKILYEDLEGGNIPALLDVEAYENSKKEQEAKTEAAKAAAIAKANIVVSDPVRVANAEEVRGDNYTASSVATDESLLAAVAETTETKLTIKPVEKDSKSRSYNVLEDKVNTAYRSWYLSYNYGDPEKGVRSWTLLTTSDVTCGAEQVYWSLPDMMQDPVTFRSTRQVSNYPVVGAELMPVFSKSFYNEQAVYSQQLRQSTSLTHVFNRFPENQILIRPPAPTITTVSENVPALTDHGTLPLRSSIRGVQRVTVTDARRRTCPYVYKALGIVAPRVLSSRTF

SEQ ID NO: 96 - protein, 949 aa, Unknown
  Description of Unknown: Human adenovirus 21 sequence
MATPSMLPQWAYMHIAGQDASEYLSPGLVQFARATDTYFNLGNKFRNPTVAPTHDVTTDRSQRLMLRFVPVDREDNTYAYKVRYTLAVGDNRVLDMASTFFDIRGVLDRGPSFKPYSGTAYNSLAPKGAPNTSQWIAEGVKKEDGGSDEEEEKNLTTYTFGNAPVKAEGGDITKDKGLPIGSEITDGEAKPIYADKLYQPEPQVGDETWTDTDGTTEKYGGRALKPETKMKPCYGSFAKPTNVKGGQAKQKTTEQPQNQQVEYDIDMNFFDEASQKANFSPKIVMYAENVDLETPDTHVVYKPGTSEESSHANLGQQSMPNRPNYIGFRDNFIGLMYYNSTGNMGVLAGQASQLNAVVDLQDRNTELSYQLLLDSLGDRTRYFSMWNQAVDSYDPDVRIIENHGVEDELPNYCFPLDGVGVPISSYKIIEPNGQGADWKEPDINGTSEIGQGNLFAMEINLQANLWRSFLYSNVALYLPDSYKYTPANVTLPTNTNTYDYMNGRVVPPSLVDTYVNIGARWSLDAMDNVNPFNHHRNAGLRYRSMLLGNGRYVPFHIQVPQKFFAVKNLLLLPGSYTYEWNFRKDVNMVLQSSLGNDLRVDGASISFTSINLYATFFPMAHNTASTLEAMLRNDTNDQSFNDYLSAANMLYPIPANATNVPISIPSRNWAAFRGWSFTRLKTKETPSLGSGFDPYFVYSGSIPYLDGTFYLNHTFKKVSIMFDSSVSWPGNDRLLSPNEFEIKRTVDGEGYNVAQCNMTKDWFLVQMLANYNIGYQGFYVPEGYKDRMYSFFRNFQPMSRQVVDEINYKDYKAVAVPYQHNNSGFVGYMAPTMRQGQAYPANYPYPLIGTTAVTSVTQKKFLCDRTMWRIPFSSNFMSMGALTDLGQNLLYANSAHALDMTFEVDPMDEPTLLYLLFEVFDVVRVHQPHRGVIEAVYLRTPFSAGNATT

SEQ ID NO: 97 - DNA, 137 bp, Unknown
  Description of Unknown: Human adenovirus 34 sequence
catcatcaataatataccttatagatggaatggtgccaatatgtaaatgaggtgattttaaaaattgtggggtgtgtggtgattggctgtggggttaacggctaaacggggcggcgcggccgtgggaaaatgacgtt

SEQ ID NO: 98 - DNA, 137 bp, Unknown
  Description of Unknown: Human adenovirus 34 sequence
aacgtcattttcccacggccgcgccgccccgtttagccgttaaccccacagccaatcaccacacaccccacaatttttaaaatcacctcatttacatattggcaccattccatctataaggtatattattgatgatg

SEQ ID NO: 99 - DNA, 342 bp, Unknown
  Description of Unknown: Human adenovirus 34 sequence
ttgtgggggtggagtttttttgcaagttgtcgcgggaaatgtgacgcataaaaaggctttttttctcacggaactactgacttttcccacggtatttaacaggaaatgaggtagttttgaccggatgcaagtgaaaattgctgatttgcgcgcgaaaactgaatgaggaagtgtttttctgaataatgtggtatttatggcagggtggagtatttgttcagggccaggtagactttgacccattacgtggaggtttcgattaccgtgttttttacctgaatttccgcgtaccgtgtcaaagtcttctgtttttacgtaggtgtcagctgatcgctacggtat

SEQ ID NO: 100 - DNA, 3450 bp, Unknown
  Description of Unknown: Human adenovirus 34 sequence
ttatacctcagggtttgtgtcaagaggccactcttgagtgccagcgagaagagttttctcctctgcgccggcagtttaataataaaaaaatgagagatttgcgatttctgcctcaggaaataatttctgctgagactggaaatgaaatactggagcttgtggtgcacgccctgatgggagacgatccggagccacctgtgcagctttttgagcctcctacgcttcaggaactgtatgatttagaggtagagggatcggaggattctaatgaggaagctgtgaatggcttttttaccgattctatgcttttagctgctaatgaaggattagaattagatccgcctttggacactttcgatactccaggggtgattgtggaaagcggtacaggtgtaagaaaattacctgatttgggttccgtggactgtgatttgcactgctatgaagacgggtttcctccgagtgatgaggaggaccatgaaaaggagcagtctatgcagactgcagcgggtgagggagtgaaggctgccagtgttggttttcagttggattgcccggagcttcctggacatggctgtaagtcttgtgaatttcacaggaaaaatactggagtaaaggaactgttatgttcgctttgttatatgagagcgcactgccactttatttacagtaagtgtgtttaagttaaaatttaaaggaatatgctgtttttcacatgtatattgagtgggagttttgtgcttcttattataggtcctgtgtctgatgctgatgagtcaccatctcctgattctactacctcacctcctgagattcaagcacctgttcctgtggacgtgcgcaagcccattcctgtgaagcttaagcctgggaaacgtccagcagtggaaaaacttgaggacttgttacagggtggggacggacctttggacttgagtacacggaaacggccaagacaataagtgttccatatccgtgtttacttaaggtgacgtcaatatttgtgtgagagtgcaatgtaataaaaatatgttaactgttcactggtttttattgctttttgggcggggactcaggtatataagtagaagcagacctgtatggttagctcataggagctggctttcatccatggaggtttgggccattttggaagaccttagaaagactaggcaactgttagaggacgcttcggacggagtctccggtttttggagattctggttcgctagtgaattagctagggtagtttttaggataaaacaggactataaagaagaatttgaaaagttgttggtagattgcccaggactttttgaagctcttaatttgggccatcaagttcactttaaagaaaaagttttatcagttttagacttttcaaccccaggtagaactgccgctgctgtggcttttcttacttttatattagataaatggatcccgcagactcatttcagcaggggatacgttttggatttcgtagccacagcattgtggagaacatggaaggttcgcaagatgaggacaatcttaggttactggccagtgcagcctttgggtgtagcgggaatcctgaggcatccaccggtcatgccagcggttctggaggaggaacagcaagaggacaacccgagagccggcctggaccctccagtggaggaggcggagtagctgacttgtctcctgaactgcaacgggtgcttactggatctacgtccactggacgggataggggcgttaagagggagagggcatctagtggtactgatgctagatctgagttggctttaagtttaatgagtcgcagacgtcctgaaaccatttggtggcatgaggtccagaaagagggaagggatgaagtttctgtattgcaggagaaatattcactggaacaggtgaaaacatgttggttggagcctgaggatgattgggaggtggccattaaaaattatgccaagatagctttgaggcctgataaacagtataagattactagacggattaatatccggaatgcttgttacatatctggaaatggggctgaggtggtaatagatactcaagacaaggcagttattagatgctgcatgatggatatgtggcctggagtagtcggtatggaagcagtaacttttgtaaatgttaagtttaggggagatggttataatggaatagtgtttatggccaataccaaacttatattgcatggttgtagcttttttggtttcaacaatacctgtgtagatgcctggggacaggttagtgtacggggatgtagtttctatgcgtgttggattgccacagctggcagaaccaagagtcaattgtctctgaagaaatgcatattccaaagatgtaacctgggcattctgaatgaaggcgaagcaagggtccgccactgcgcttctacagatactggatgttttattttaattaagggcaatgccagcgtaaagcataacatgatttgcggtgcttccgatgagaggccttatcaaatgctcacttgtgccggtgggcattgtaatatgctggctactgtgcatattgtttcccatcaacgcaaaaaatggcctgtttttgatcacaatgtgttgaccaagtgtaccatgcatgcaggtgggcgtagaggaatgtttatgccttaccagtgtaacatgaatcatgtgaaagtgttgttggaaccagatgccttttccagaatgagcctaacaggaatctttgacatgaacatgcaaatctggaagatcctgaggtatgatgatacgagatcgagggtgcgcgcatgcgaatgcggaggcaagcatgccaggttccagccggtgtgtgtagatgtgactgaagatctgagaccggatcatttggttattgcccgcactggagcagagttcggatccagtggagaagaaactgactaaggtgagtattgggaaaacttggggtggggttttcagatggacagattgagtaaaaatttgttttttctgtctttcagctgtcatgagtggaaacgcttcttttaaggggggagtcttcagcccttatctgacagggcgtctcccatcctgggcaggagttcgtcagaatgttatgggatctactgtggatggaagacccgtccaacccgccaattcttcaacgctgacctatgctactttaagttcttcacctttggacgcagctgcagccgccgccgccgcctctgttgccgctaacactgtgcttggaatgggttactatggaagtatcgtggctaattccacttcctctaataacccttctaccctgactcaggacaagttacttgtccttttggcccagctggaggctttgacccaacgtctgggtgaactttatcagcaggtggccgagttgcgagtacaaactgagtctgctgtcggcacggcaaagtctaaataaaaaaaaattccacaatcaatgaataaa

SEQ ID NO: 101 - DNA, 19455 bp, Unknown
  Description of Unknown: Human adenovirus 34 sequence
atggccagccgcgaaggaaatcagttaagcgaccgccacagggagcacacccccgaacgcggaaggggttctgccagtcatccgccttccaggtcggaccgcagcccttcgcaatcgcctccacctctgcccccgaagagaaacacctgtcgccgtgtggggtcaggttcttctaccgacagtcagttggtaatggtgagcgaaacgtcacaatcctccctgtctccggaacggagcgacagtcctcctcctccgatacccccgaaaaagaagccaaggaagaccaaacatgtccccatgcaagacatcagtcaagacagcgaagaagaaagagaagaggcgcaacttgtagcagtgggtttcagctacccgcccgtgcgcatcgttgagaaggatggcaaaagaagcattgagaagatcgccaaagatgaccctctggctaaaggagctgctgcctgcactgttaagaatccgattagcttgcccctggtgtctgcttgggagaaaggcatggaagtgatgtgtctgctgatggagaagtacaggctggataacgaacttagaacctcttttaaactaatgcctgagcagcacgaacaatacaagcgcatctgtcaccagtacgtgaacgaggagcaccgaggcatccagttaactttcactagtcacaagacactgagcacgatgatgggaagatttctgcagggaatgatacattctttttctcagatcgcccaccataattgggaatgtacaggctgtgcgttgtggcctcatggctgcaatgattatgagggcaagctgaagtgcttgcatggcaatattatgattcagaaggagcagattatcgagatggatgtggccagcgagaacggacaacgagccttgaaggagaatcccgagcgaaccaaaatcacccaaaaccgctggggcagaagtgtggtgcaaatagccaacaatgacgcccgctgctgtgtgaatgatgccggctgcgcagctaaccagttttcgagcaggtcctgcgggatgttttataccgagggtagtaaagcccagcaggctttcaagcaatatgatgctttcatgagagccgtgtatccaggaatcagacaggatcaggccaagatgatactgatccccctgcactgcgattgtaaccacaagcctaattgggtgcccgccatgggtaggcagacctgcaagatgaccccgttcagcattgccaatgctgaagatctggatgtgggcatgattgcagatcccaccgtgctggcaagcgtaagacatccgtcgctgatggtgtttcagtgctgcaatccggtgtaccgcaactctcgcgctcagagcactggtcctaattgtgatttcaagatttcggctcctgacctgctgggagctttgcagctgaccagaaagctgtggagtgacatcctgcccgatataccggttcccaagttggtgattcccgaattcaagtggcaacccaagtatcagttccgcaacgtatcactgcctgcgggtcattctgattctcgtcagaacccattcgacttgtaaataaataagtaatccagagcctcgatacatgtaaaaaataaagtgctgtttattgaacacgttgtttacatgaatcattattgcacatccatacggtcgaacgcagtggccctttcgatgtgtgtacgatgagagcgaaaataaggcgaatgggtattgagaaaatggtagagtgctttttgattgtcacacagggtgggctggactttaggagaatgaagcatgttgtttggcactccagttagcaatttcatggtggggtttccgtccatgggacggtcaggccagtgcacaaaggcatgaaggaacatgcagcagaaaagtccgcaggcggcagaacgggggccctgcacggtctgggtagatttttccagcgtaatacaccggtccttggtagcaagagcgctgcggcgcaggagaccctcatattcaaactggtaaatctgtttgagacgatcatccgagaatccaaaaggatcaaaaaggtagcaggtgttagaacgtgggttccaaccgaaagccaaccagtgctctccccccgtctcacgtccggccgtatttacaatggcacaggcgagcttatcgggggccatgaaccccgggaagcgcttatcaaaggttcccaaaaaatatggtccgcaacccaggtcttggacaatggctctgagctcttgctcgctggagccgttttgggatccgcaggccatggttgcagctgctgtttgcaagaagcaagaagcttcttacgtggtagcgttaccggccgagaacggtgtacgcaggtagactgcctcgatgatgccgcggtgtggctgatgcactctgaccacgtcgaaaacttcgaagagaagataaagcagggtgggctcatccatgggatccacctcaaaggtcatgtccagagcatgagctgagttggcatagagcatgttctgtcccaagtctgtaagggctcccatagacatgaagttgcttgagaacggtatgcgccacatggttctgtcacacaagaactttttctgcgtaacactatttacggcagttgttccaatgagtggatagggatagttagcgggatagggttgaccttgacgcatggtcggagccatgtaacccacaaagccagagttgttgtgttggtagggtatggcgacggccttgaagtctttgtaattgacctcatcaaccacctgcctgctcatgggctggaagtttctgaaaaatgaatacatgcgatctttgtatccttctggaatgtagaagccctgatagccgatgttgtagttggcgagcatctgtaccaagaaccagtctttggtcatgttgcattgggctacgttgtagccttcgccatccacagtgcgctttatttcaaattcgttaggagatagtaacctgtcatttccaggccagctcactgaagagtcaaacatgatggaaaccttcttaaaagtgtggttcaggtagaaggtaccatccaggtagggaatagaaccagaatagacgaagtaggggtcaaatccagaccccaaagagggagtttctttggttttcagtctggtaaatgaccagcctctgaaagccgcccagttgcgagaaggaatggaaatgggaatattggttgcattggcaggaatggggtagagcatgttagctgcagataggtagtcgttgaatgactgatcattggtgtcattccgcagcatggcttcaagggtggaagcggtgttgtgagccatggggaaaaaagtagcatagaggttgatgctcgtaaaactgatgctggcgccatctacccgtaggtcgttaccgagggaactctgtagaaccatgtttacatccttcctaaagttccactcataagtgtaggagcctgggagaagcagcaggtttttaacagcgaagaatttttgaggcacttgtatgtggaaaggcacataacgtccgttacccagaagcatggatcggtaacgcaagccagcgttacggtggtggttgaatgggttgacattgtccatggcatccagagaccacctggcaccaatgttcacataggtgtctactagagatggcggcaccacccgcccgttcatgtagtcgtaggtgtttttgttttctggaagagtgacattggacggggtgtatttgtacgagtctgggagatatagagccacattggaataaaggaaacttcgccatagattggcttgaaggttaatttccatggcaaatggatttcccttagcaagttcactgctgccagttgggtctacatttgtccaagtagattggtctccatttggcttaatctccttgtaactatctgttcgcggaccgacaccatccaacggaaaacaatagttgggaagttcatcttccacaccatgattttcaataacacgtacatcaggatcataactgtccacagcctgattccacatgctaaagtatctggttctgtcgcccagagagtcaagcaagagttggtaagacagttctgtgtttctgtcctgcaagtcaaccactgcattcaactgagacgcttggccagccagtacccccatgttgccagtactgttatagtacataagtccgatgaagttatctctgaagccaatgtagttgggtctgttgggcatagactgttgtccaagattggtctcagaactagcatctgaaactccaggtttgtacacaacatgagtatctggacattccaggtccacattttctgcatacattacaattttaggtttgagttctgatctttgtgatcttaagtcaaagaagttcatgtcaatgtcatactcgatgttgttagtgccatcgtcttcttttggttttacctttgcctgacctcctttaatattagtaggtttagcaaaagatccgtagcagggtttcattttagtttcaggtttaagaaccctccctccatactcttcggtttttccgtctaggtcagtccaagtttcgtctcccacttgaggttctggctgataaagcttatcagcatagattggtttaggaccttcagttgaaacttccaagcccaccggcaatccgtcttttgtgatttcagcctcggcttttactggagcattaccaaaagtgtatgttgcttttttggcttcttccccatcatcagtattgccgtcgtccactaggccagtgcttgtaactcccttatccaaccactgagatgcatttggagcgcctttaggagccagggagttgtaagccgtaccagaatagggtttaaaactgggacctctgtccaacacgcccctaatgtcaaagaacgtgctggccatatccagcactctgttgtcgcccacggccagggtgtaccgcactttgtaagagtatgtattgtcctcccggtcaacgggcacgaagcgcaacatgagccgctggctacgatcggtggtcacatcgtgggtcggcgctacggtaggatttctaaacttatttcccagattgaagtaggtgtctgtggcgcgggcgaactgcaccagacccggactcaggtactccgaagcatcctgtccggcgatgtgcatgtatgcccattggggcagcatcgatggggtggccatcttgaaagtaactcagcgtcgacgcacgacctcttccttttttcctctgatgctgtgacggcgtgtaatgacacatatacacagataggcaagttaagcgctactccatatttaattaaaagcagcgacggcgttttacactttgcacgcctagacccacgatgctgttcagagtattttgccagtgtgcatttggacgaggagcgcccccgggacgtgacctggctacggcgactggtttcggggcagcgacaggcttagaagcgggtacagcagtagcagcaggaggagggggcaaatccaaggtgacgggtcgatgcaactgagaaggtttcatcaccccggtggccataggggctatcggtctagtggtgggcattccaagcttcgttgcttcctcataagaaggcggttcatctacgcgcgtcaccagcgtctcttccaaatcgggacgcggacgcttgtcgcctcgtttttctggcggaggaatttcttcctccacttgcatttcacctggggttgctggcggcgggtccaaacgactgtttatctttttctgcacagcctggttagccaaatctaccactccattgataccggaagctatcccatcgactactttttgttggaagttctggtctttaagtttatttctaagcgcctgtcctgtactgctgttccaagctttgttcccgtatgtttttatggttgagccaaaatttttaagcccgctccagatactgctccaattgaaggcgcccccgttcagttggctcgtgccgatgtcgctccaggtgcccatgtacggcttcgtgccgtgtcgcggagccaaggatgaaaaattgatgtcttccatctctaagaaaacatagtcacagtaccaggagtgtcagagtccattgtattttttatttatacgttttttttttttccaatgtcaatgtcgttgcgaggcctgaaccgccacggaagctatgcctggtattgcgccaatcgcagcagcgataattggaattaaggctggcaaaaaaccaccccgcaattgcttgcggatagcacgccgtcgcctgtagcgtcgcattccgcgccccaacatccctcttctacggcgcgagtttcttcctcggtaaccagtgatgggaacgcgaaggcgacaagtgagggccatatctgcaaggaggcagcggcaacattgattaagtgatgatactaggatggtaacgcgcacgcggcagtgtcaaaggttccgcactaccattgcggtacacttgccgcaccagggcgccgggaatcggtttgcttgtgcgtctacggcgacgactgcgatttgcaggtgtcttgcggcgacggcgggaagtactgtttcggctgcgatagtagcgagtgcctcggtaaccaggagtaggaataatagatgggtgtacgacatagttgggcatcaacagacttgctggaccgtactttcgtcgggatcttcgagtgggaccgacggcgtcagttgtaataggcatgggcatccatgggtccgtttgcacttcagtggaggtggcagtaggctttgcgggttcagtttgcacttccatactttcagtgggaattttaatgtctacagtttgtactcccagaccaggcgctacctgcttaatgggtctcactttaacctcaggttgaatatctggatccacttttactttctccaaaacgtcctccaacttctggcgtttgggcaccatcagttgcatagtgggatacaaatcttcaccttcgcgtttaacacctgttcgcggagttacgggtaacacttgctgcaaagtgaccggtttaagactaggggtgggatttccatgatccaagggtatggacactgtttcatccttgggatttattctactacgcttgccataagcaaactcgcctaatcggtcagctgcctgctcaagaatatcatcatccccgtacacctcatcataggaacgcttaaaagtagcgcttgaacgctcgccgggtgtaaagaccaccgaagttccaggtctcaacacatgtcgaactttgcgcccacgccattgcacgcgtcgccgtggggcaaactcgcgcacaaactccgccagcccatcatcgccatcttcctcttcttttttgtccttttttacccgcttgattttgcggggttttttttcatccttcaacggttggccgtagacttcaggtgcgataacctgcagcatttcttccttgtatttgcgcttggacatcctcgccgctgggacacaacatcggagactgctcagtatcttctaagtgcgagggggacgggtgcgcacgggtacacgttgaccggtggcagcgtcacgcacccagtatacattgcctcttcgcgattgggccatgtcggcaatagtcgccgctgcgacagcggctgcttgcctgcgggacctgccggcgctggcgcccgaagctgcacgtctggccgccctaagcatggctcttcgccccacgcgtctagctcttcgtagcagagctcttgctgctcgcatggcagtggtagctcggtgacgtctggcaatgcgccttcgccggctcttacgtcgagcatagttgcgagcgtcagccactacactgtcaataactgcgtccacagtagatgtaggcgcagtaggagtataattacgggcgtcggcaaccacctgatcgattacatcatcgacggtggttcgaacgcgagtgcggcccttgagggcaccccatggagcgcgaaaatgcccgcgaacacgcacgggatgttgggtagaacgtttgcgtgcgcctccgtacatcttgctgggagcgcgcagaccccaaccggtgttattactgggcgagataagaacggacattttttttttttttttagaaagtgcggcttgaaaggacgcgcggtgcgactatgcccagtgccttgtacacgtagggacaggtgcggcgtctggcgtcagtaacggtcacacgttggactccccggatactgctgcgcaacggcagggtcccgtgatctgtgagagcaggaacgttttcactgacggtggtaattgtgggcgccggcggacggattaaaatctggttctcaggaaagcggttgaagacgtgcgtaagcgaggtggactggcggagctgctgggagtacacagcttgttcgttgtagaagctctttgaaaagacgggcataagctctgcacccaccacagggtagttactgacttgtctagtggagcggaaagtgacaggatcctgcatcatgtctggaagcgaccagtagacctgctccgctccgcaggtgacatctgaggtggtgagcaatgtccaggaacgcactcctttttcggggtcgccataattgtacgaaaggtaccaactgcgataggccgtgttgattttatcttccaacacattgtaacttctgtttttgccatctttttccacaggcttaatagtgagttttaactctatgttttgagacacatcatccaataatgattctttagtcggaacggatgttgcggcaaaactgtctcccctgatttcactagcgttagccacccttaccggatcgttggcaactatgtttgctttagcttctgcagcagcttctattttggctttttgatctttcttgctgttctcataagcatctacatccaaaagggctggaatatttcctccttctaaatcctcatacaagatcttaaaaccctcttggaatgggtgtttctttctaatgccaagaaggttgctcagacggctttcggtaaagtccactccgcagccaggcagcaatacgatgtcaggatggaaggcctcataggtgtaaaccccaggcatgatcaacttagtttctggatcccatcccaacttgaagttcctagtgtcgaacttaacaccaatgtcactttccaacactccattctgtctgcccactttcaagtaattgtctatgatggcattgttcatcaagtcgatagtcatagtgaccgaaaagttgccttctggcaaagtaaactcgaaccactcgtattttagaatatcttgcttatgatcataattatcgtctactctaacaccctcaggaggttttctggacaccatcacacgcgctttgaacttgttactaaacatatactcgttcacgttgggcatgttagtatgcatgatggtttttagctgaccgccccaccgcgatcgttcatcaaagttaatggtctgggtgctggcttccgtaggggtaaagtcattgttttgcaccaccgtggtcaagaagttgctgtggtcattctgatagttcagagaagcaatgtccgccgacttgttgtccaccagatacaacctggtggtatcgtactgaggtgccagttccgagtaacgaatgctgtttctgccctccgtaggtgccaggtatcgcggaggcacaaagggagcctccagtggggattgcatcaccgccgtcgcctgctgctgctgcatcacgctctcgtacgaaggaggaggaccctccggatacaccaccgctccgcctagcacgactcgcctcattatactagacacagataataaagaagaacgaacgtacgctcgtcgccatggccttggtgagttttttcttttttatttttttttacaacataccacccaagcgagggcgcaaatgagcaaacgggttgccccttcctctcccacccaagtccaatacgctgctatcatcggccgaatcctcatcgtcccacacaagacccctctgtctgtcatggcgctggcgtctacggctcgctctacttgtagtccccatgatcccaggctcgtctctgtgatcctgagcataagtcttccatctactcattttatccaccaaactttctattccattgtttgggaaatttttttctcttgccggtctgagcaaggaatcgtttaggtactcctcttcgcccattaaactcgggcgacttattctacccacttcgctgctacgtacactgtgtagagaaaagggtagactaggaaaaggacttgcagactcgggctcagccgcggtagcaccaatgaccccggacagcgatgcagaagaatgcattctatcgccgccttcctttttccacgtgcgatgatcagaaagaggtgaaaaaacatcgctgtccacgtcgtcccacagaaatccgtcattagggtcgggcatgtcatattcgcccgtgtagaaaccaggtgggggcagccagtgcgggtttaagatggcattggtgaaataatcagagttcatagcggcagctctgtgcaagtagtccagcagtttgttaatgaaaggtcggttactggcatacatgctgggctccatatttcgcgctgtcatgtccagtgctgcagtcggagttgccccctcttgcatcagaaacaatcccacgctctgctgcacatatctaaggatcctctcctcctccgcagtaagagcatattgaggagggatcttttgagaccgattggtaagcaagaagttcagagtggcttccaaactgccagtgtcttcctgtcccaaagcgcgactgacttgggtaatttcttgataggtctgctcgtccacctgactttgccctatggcttcgcgatacaggtttagtaggtaacccaaataggaattacggtcgatgctaccgctgtcggtgaaaggagctaccaacagtaataataggcgggagttcggagttaacaagctagacacggttgctctttctcctaccggggcatgcactccccacaaacctttaaggtttttaaaagcttggctcagatttaccgtctgcaagccctgtctgctagtctgaaagaagtaatcaggaccggactgatatacttcgctctgaggtacttctgataccatcagtctcaaagcacttaaaaagttagtataatcctgttgaccacgcggcacattagcaggctgagtactcaagaaagcatttaacgccaccagcgaacccaggttggcatcgcgctggaacctttcgcgctgagacacggcttcgcgtacatctgttatcatacggtccaaattggtttgcacattgctactgttgtagcgagccacgcgttctaagagagcgttgtataccagtccggcctcatctggacgaatagctttgttctccaccaacgcgttcacgatggccaggaccttctcatgagtgggattagagcgggaaggcactacagcttccatgatggccgatagacggttggcctggggttgctgtctaaaggcttcggggttgcgagtcgtcaacgccatgatacgttgcatggcctgggtccaatcgtccgaggagttaatgccggacggctggctctgcagcgccgcccgcattgcgggatccggtgcttgctgttccatctagcaaaaaacacgggttgtgccatcagtcttccaagtactcgccctcttcctcctcgccttcatccgcctcttctatgtaaggaagctcacatcctgccgtcgcggcgttcagagccctgcgactaggctgccactgcaagtcagctcccatatcaaagtaattctcaccctcggttccagctccagttagagctctttgcaaactgtgcatcagttccctgtcgcttaactcgcgcctcctgctggcgctcaccgcgcgatgcattctgtcattgcggtacaccccaagatcatcgctcagggtcaacaccttcagcgtcatgcgcatgtagaacccatctatcttcacctccttgtctatgggaacgtatggagtcttgtagatcttgcgagcgtaatactttcccaagctcaaaaccgagtaattgatggcagccaccttctcggccaggcccaggctccgctcctgcactatgatactctgtagaatgttgataagatcatacaaccatctcccctcgggttcggtgatgttgagcagcgcctctctgaaagcctcattgtctctgctgtgttgcaccaccagaaacagctgtgcggtcagaggtttgctagtagggttctgaatgatagcttccatcaaatcccacaaatgcatcaaaccaagggtgacttcttcgcgggcaatgagggttcgcacatgattattaaaagacttttggaaattacgctcttcctttactgtctgttcgtaagccgatacaaggttggctgcagccacgtgtgccctggcaggactgatccctgtcacttcatcaacttcgaaatcctcgtcccgcaacactcgtcttctgtccaaaccgtgacgcagctcacgacccgcgttaaagcgggaagctcgcatctcctccggctcctcgccgcttctgtctctaaataggttctgttggggcacatacgcctcgcgagaatcttttttcagttgaactcgcggatgccgctcgggcgaaggcgcacctagacgtgccagtccttcgccctcttccaagtccagatcataggcgggctgtcccgcaccgctcacagcggcagttgcagtagttgcagggacagccttttgtggttgctgctgctgcgaggggggctgttgttggggacgcatctgtcgcagcacgggatgcatctgagcggcaaaaaaaaaaaataggactcacttccctgccattcggcaaccagcaaaacgactcgattccgtatcctggatttttgtaggctgggtcgagacgggagtgccaataccacgttagccgcggctccggccggctcgagtacaagtctcgaaccggggtacaccgcgacccaacccgttcacgttcctccaggctacggagtcgagtcgctgaacgctttcattttctccgtgtctatagagcatcaatgactgcgcgcgcctcactggtcaaaccgtgcctacaatgaactacttcatgccgctacgcaacatttggaaccgcgtacgcgagtttcctcgggcttctactaccgccgcaggaatcacctggatgtccaggtacatctacggctatcaccgccttatgttggaagacctcgcccccggcgctccagctacagaacgatggcctctctaccgccaaccaccgccgcattttcttataggttaccagtatctggtgcgcacctgcaacgattacatctttgacacccgcgcctattcgcgccttaaatacaccgagctcgtgcgccctggtcaccagacagttaactggtcagtcatggccaactgtgcttacaccattaataccggggcttaccaccgctttgtggattttgatgactttcaagccaccctcacccaagtacagcaagccatcctcgccgaaagagtcgtagctgacttggcactggtacaaccaatgcgcgggtttggactcacacgtatgcatggcagaacgggtgaggaagaagtgcccgtagaacggctcatgcaagactactacaaagatcttgctagatgtcaggataatgcttggggaatggccaatcgcctgcgtatccagcaagccggacccaaagacctggtgctcctcgccaccatccgccgtcttagaactgcctactttaatttcatcaccagcagcatcgtctcaccttcccgagatgaagaagaaacagaagacccagaccgaacacataaccacccccgcccacaagaagccgtactcagcctaccttgtgactgtgactggttagacgctttcgtcgaaaggttttcagatcccgtggatcttgacacgatcagatctctgcgcgcagtccctacgggccaattaataaaatgtataatcagcgccctctccctcccaaacggagaacctcccagtcaccactttaaggagatgcgcggcggtgtttttactctgcgaccgcgcgagaacggccgcgccgtcactgaaaccatgcgccgccgccgcggagaggtcattgaacgattcatcgaccgtttgcccgtgcgccgtcgacgtcgccgtgtgccccctccgcccccgcctgaagacgaagaagagatgttagtggaagaagagatagaagaggaagaagagatcccgggagccttcgaacgcgaagtacgggccaccatagccgaactcatccgtcttctcgaggaggaattgaccgtgtccgcgcgaaactcccagttttttaattttgccgtggacttctacgaggccatggagcgcttggaagctctgggcgatgtcagcgaaatgccgctgagacgatggatcatgtatttcttcgtcgccgaacacattgccaccacactcaactacctttttcagcgcctatgcaactatgcggtcttcaccagacacgtggagcttaacctcgctcaggtggtgatgcgcgcaagagactccgagggggccgtggtttacagccgcgtctggaacgaggcgggcatgactgcattctcccaactcatgggccgtatctccaatgacctcgcggccaccgtcgagagagcgggtcgcggagatcttcaggaggaagaaatcgagcagttcatggcggagatcgcctaccaggacaactctggtgacgtacaagaaatactgagacaagctgccgttaacgataccgaaattgattctgttgaactctctttcaggttcaagctcacggggccggtagctttcacccagagacgtcagatacaagacgtcaatcgacgcgtggtggcgcacgcaagtcttctcagagcgcagtaccagaacctgcccgtgcgcggcgccgacgtgccactaccagccatgcctccgggtccggaacaaccgcttccgcccggcgcgcgtccccgtcatcgcttctgagcatgcaagaagcaagagagccaccaccgatcaaaagaaaaaacaaaggtacggtagtggcgcccaaaggacacggaaccctgcaagccattgacatctctacaaacgaacctgtggaaatcaagtaccatctgaacctcccgcacgccctggaaaagatcatgcaagttaatcttctgtccctacctactaacctgagtccgcagcgtctcaggactctggacagctccagcctgcgcgctctggtccttcagctccgcccctcccgcgccgaggtctggacttgcctcccgcgggggctcgtcagcatgaccaccaccgaaacagaagatgaacaggccgatacagcgaatatagaagagcacgagatacaatcgccaggcctcggcttcccactgaaatttctcgtcaagggaagccaggtacagctcattcacgagatacaacccgtgcaacgctgcgactactgcggccgtctgtacaagcacaaacacgaatgctcggcgcgccgcagaaacttctacttccatcacatcaacagccaatcctccaactggtggcaggaaatccagttcttcccgatcggctctcatcctcgcacagaaagactcttcctgacctacgatgtggaaacttacacctggatggggtcctttggcaaacaactagttcctttcatgctggtcatgaaactctcaggagaagagcgtctcgtcaacatggcccacgatctagccattaaactaaagtgggatcgatggcaacaagaccccagaaccttctactgtgtcactccagaaaaaatggcaattggccagcattttcgtcagtatcgggaccagttacaaacagcactggcggtggatctttggtcatcattcctacatgcaaatcctcacctgcacgaatgggctctcgaacactacgccttatctgaccctacagacctaacctttgatgagctcaataagctacctcacgtcaaaggcacgccgcgtttcatagaattatacatcgtaggacacaacatcaacggtttcgacgagatcgtcctagctgcccaggtgatcaacaatcgagcggaagtaccacagcctttccgcatcactcgcaattttatgcccagagccggtaagattctcttcaacgatgttactttcgctttgcccaaccccgcctacaagaaacgggtagacttccaactctgggaacagggagcctgtgacgacatggacttcaaataccaatttctcaaagtcatggtcagagacaccttcgcccttactcacgcttcgctgcgaaaagctgctcaagcatactctctacccgtagagaagggctgctgcccttacaaggcagttaatcagttctacatgctaggatcttaccgtgcagacaaagacgggtttccgctagaagagtactggaaggatcgcgaagaataccttctcaaccgcgaactgtgggaaaagaaaaaccaaccaggttatgacatcattcaagaaacacttgactactgcgccctagacgtacttgtcaccgccgaactggtaaccaagcttcaagaatcttatgcccactttgtcagagactctgtaggtctacctcatgcccatttcaacatttttcaaagacccaccatctcttccaattctcacgccatctttcgccagattgtctacagaacagaaaaacccaatcgcaccaacttgggtccggggttgctagcgccatcacatgaactatatgactatgtgcgagcaagtatcagaggggggcgatgctatccaacctatataggcatctttgaggatcccatctacgtctatgacatctgtggcatgtatgcctctgcactcacccatcccatgccctggggcagtccccttaacccatatgagcgtgcactggcagctcgagaatggcaaatggccttagatgaccccactcccatcagctattttgataaggatttacttccgggaatctttaccatggatgcagaccctcccgatgaacttatgctagacccacttccccctttctgttctaggaaaggaggtaggctctgttggaccaacgaaccccttcgaggcgaggtggccaccagtgtggatttaattaccttgcataatcgagggtggcaagtgagaatcgtgccagatgaattgacaactatcttccccgaatggaagtgcctagcacgcgagtatgtccaactcaacatcgctgccaaagagcgcgcggacaaggaaaagaaccaaaccatgcgatccattgccaaacttttatccaacgccctgtatggatcatttgccaccaaacttgacaataaaaaaattgtgttttctgaccaaatggacgaaaacctcatgaaaggcatctcaaccggcactgtcaatatcaaatcctcctcgttcttagaaactgacaacctgagtgcagaggtcatgcccgccttcgagagggaatacctaccccaacagctgacgttcctggacagcgatccggaagacagtgaggaagagcaaagaaccgcccccttttatacccccccagcggggaccccaggtcacgtgaaatacacctacaagccaatcacattcctggatgttgaagagggtgacatgtgtttgcatactttggaaaaggtggaccccctggttgacaacgatcgctacccctcccacatagcctcctttgtgctggcctggacgcgcgcctttgtatcagagtggtcagagttcctgtacgaagaagaccgaggcactccactggagaagaggcctgtaaaatcagtctacggggatacggacagcctgtttgtcactcaacgaggacacgaactcatggagaccaaaggtaagaaacgcatcaaaaaatatggcggaaaacttgtttttgaccccaatgaaccggatttaacctggctggtggaatgtgaaactgtttgcgcctcctgcggcgcagatgcatactccccagaatccattttccttgcgcccaagctgtatgcgctgaaatgcctatactgcccggtatgcaagaaaacttccaaaggtaagctccgcgccaaaggccacgcagccgaggcgctcaactacgaactcatggtaaactgctacttggccgacatacagggcgccaagcgacagaagttctccaccagcagaatgagtctgaagcgcaccctggcaagcgcccaagcaggcgcacaccccttcactgtgacggaaacaaccctgactcgaacactgagaccctggaaggaccgaaccctggcagcgctggacgcccatcgtctcataccctactccaggagccgtccaaacccgcgaaacgaggaggtctgctggatcgagatgccatagaacacatcactgaactgtggaacagactagaacttttgcagcaaactctctccaaaatgcccatggctgacggtctaaaaccgctgaaaaacttttcctcactacaagaacttctatcactaggaggagagcgcctcctaatggatttggtgcgggaaaatatgcatgtaagggaaatgatgaacgaggtggcccccttgcttcgagaagacggcagttgccgttccctaaactaccacctgcaacctgtaatcggaatcatttatggccccaccggatgtggcaaatctcaattgctcagaaacttgctatcatcccaactaatcacccccgccccagaaacggtgttcttcatagccccccaggtggacatgattccaccatcggaactgaaagcttgggaaatgcaaatctgtgaggggaactatgctccggggcccgaaggaacattcataccccaatcgggtactctccgccccaaattcattaaaatggcttatgatgatttaactcaggaacataactatgatgtgtcagacccacggaacgtgtttgcccgcgctgctgcccacggccccattgctattatcatggatgagtgcatggaaaatctcggaggacacaagggtgtctccaaatttttccacgcttttccatccaagctacacgataaatttcctaaatgtaccggatacaccgtcttggtggtccttcataacatgaacccaagacgagatcttggcggcaatattgccaacttaaaaatccaatccaaaatgcacataatttcaccccgaatgcacccctcccagctcaaccggtttgtaaacacctacaccaagggcttatctgtggcaatcagcctacttctaaaagatattgtgcaacaccatgcactgcgaccttgttatgactgggtgatttacaacactaccccggagcatgaatcccttcaatggagctatctccaccccaaagatggcctaatgcccatgtatctaaacattcaatcccacctctataggattctggaaaaaatccaccgtgttctcaatgatcgagatcggtggtctagggcataccgtgcgcgaaaaatgaaataaaaacacttgattttaaatcaa

SEQ ID NO: 102 - DNA, 3441 bp, Unknown
  Description of Unknown: Human adenovirus 34 sequence
atgtctggtgacgcggctgagctatctcggctgcgacatctagaccactgccgccgctttcgctgctttgcccgggaactcattgagttcatctacttcgaactccccaaggatcaccctcaaggtccggcccacggagtgcggattactatcgaaggcaaaatacactctcgcctgcaacgaattttctcccagcggcccgtgctgatcgagcgagaccagggaaacaccacggtttccatctactgcatttgtaatcaccccggattgcatgaaagcctttgctgtcttatgtgtactgagtttaataaaaactgaattaagactctcctacggactgccgcttcttcaacccggattttacaaccagaagaacgaaacttttcctgtcgtccaggactctgttaacttcacctttcctactcacaaactagaagctcaacgactacaccgcttttccagaagcattttccctactaatactactttcaaaaccggaggtgagctccaaggtcttcctacagaaaacccttgggtggaagcgggccttgtagtgctaggaattcttgcgggtgggcttgtgattattctttgctacctatacacaccttgcttcactttcctagtggtgttgtggtattggtttaaaaaatggggcccatactagtcttgcttgttttactttcgcttttggaaccgggttctgccaattacgatccatgtctagacttcgacccagaaaactgcacacttacttttgcacccgacacaagccgcatctgtggagttcttattaagtgcggatgggaatgcaggtccgttgaaattacacacaataacaaaacctggaacaataccttatccaccacatgggagccaggagttcccgagtggtacactgtctctgtccgaggtcctgacggttccatccgcattagtaacaacactttcattttttctgaaatgtgcgatctggccatgttcatgagcaaacagtattctctatggcctcctagcaaggacaacatcgtaacgttctccattgcttattgcttgtgcgcttgccttcttactgctttactgtgcgtatgcatacacctgcttgtaaccactcgcatcaaaaacgccaataacaaagaaaaaatgccttaacctctttctgtttacagacatggcttctcttacatctctcatatttgtcagcattgtcactgccgctcacggacaaacagtcgtctctatccctctaggacataattacactctcataggacccccaatcacttcagaggtcatctggaccaaactgggaagcgttgattactttgatataatctgcaacaaaacaaaaccaataatagtaacttgcaacatacaaaatcttacattgattaatgttagcaaagtttacagcggttactattatggttatgacagatacagtagtcaatatagaaattacttggttcgtgttacccagttaaaaaccacgaaaatgccaaatatggcaaagattcgatccgatgacaattctctagaaacttttacatctcccaccacacccgacgaaaaaaacatcccagattcaatgattgcaattgttgcagcggtggcagtggtgatggcactaataataatatgcatgcttttatatgcttgtcgctacaaaaagtttcatcctaaaaaacaagatctcctactaaggcttaacatttaatttctttttatacagccatggtttccactaccacattccttatgcttactagtcttgcaactctgacttctgctcgctcacacctcactgtaactataggctcaaactgcacactaaaaggacctcaaggtggtcatgtcttttggtggagaatatatgacaatggatggtttacaaaaccatgtgaccaacctggtagatttttctgcaacggcagagacctaaccattatcaacgtgacagcaaatgacaaaggcttctattatggaaccgactataaaagtagtttagattataacattattgtactgccatctaccactccagcaccccgcacaactactttctctagcagcagtgtcgctaacaatacaatttccaatccaacctttgccgcgcttttaaaacgcactgtgaataattctacaacttcacatacaacaatttccacttcaacaatcagcattatcgctgcagtgacaattggaatatctattcttgtttttaccataacctactacgcctgctgctatagaaaagacaaacataaaggtgatccattacttagatttgatatttaatttgttctttttttttttatttacagtatggtgaacaccaatcatggtacctagaaatttcttcttcaccatactcatttgtgcatttaatgtttgcgctactttcacagcagtagccacagcaaccccagactgtataggagcatttgcttcctatgcactttttgcttttgttacttgcatctgcgtatgtagcatagtctgcctggttattaattttttccaacttctagactggatccttgtgcgaattgcctacctgcgccaccatcccgaataccgcaaccaaaatatcgcggcacttcttagactcatctaaaaccatgcaggctatactaccaatatttttgcttctattgcttccctacgctgtctcaaccccagctgcctatagtactccaccagaacaccttagaaaatgcaaattccaacaaccgtggtcatttcttgcttgctatcgagaaaaatcagaaattcccccaaatttaataatgattgctggaataattaatataatctgttgcaccataatttcatttttgatataccccctatttgattttggctggaatgctcccaatgcacatgatcatccacaagacccagaggaacacattcccctacaaaacatgcaacatccaatagcgctaatagattacgaaagtgaaccacaacccccactactccctgctattagttacttcaacctaaccggcggagatgactgaaacactcaccacctccaattccgccgaggatctgctcgatatggacggccgcgtctcagaacagcgacttgcccaactacgcatccgccagcagcaggaacgcgcggccaaagagctcagagatgtcatccaaattcaccaatgcaaaaaaggcatattctgtttggtaaaacaagccaagatatcctacgagatcaccgctactgaccatcgcctctcttacgaacttggcccccaacgacaaaaatttacctgcatggtgggaatcaaccccatagttatcacccagcaaagtggagatactaagggttgcattcactgctcctgcgattccatcgagtgcacctacaccctgctgaagaccctatgcggcctaagagacctgctaccaatgaattaaaaaatgattaataaa

SEQ ID NO: 103 - DNA, 972 bp, Unknown
  Description of Unknown: Human adenovirus 34 sequence
atgaccaagagagtccggctcagtgactccttcaaccctgtctacccctatgaagatgaaagcacctcccaacacccctttataaacccagggtttatttccccaaatggcttcacacaaagcccagacggagttcttactttaaaatgtttaaccccactaacaaccacaggcggatctctacagctaaaagtgggagggggacttacagtggatgacactgatggtaccttacaagaaaacatacgtgctacagcacccattactaaaaataatcactctgtagaactatccattggaaatggattagaaactcaaaacaataaactatgtgccaaattgggaaatgggttaaaatttaacaacggtgacatttgtataaaggatagtattaacaccttatggactggaataaaccctccacctaactgtcaaattgtggaaaacactaatacaaatgatggcaaacttactttagtattagtaaaaaacggagggcttgttaatggctacgtgtctctagttggtgtatcagacactgtgaaccaaatgttcacacaaaagacagcaaacatccaattaagattatattttgactcttctggaaatctattaactgatgaatcagacttaaaaattccacttaaaaataaatcttctacagcgaccagtgaaactgtagccagcagcaaagcctttatgccaagtactacagcttatcccttcaacaccactactagggatagtgaaaactacattcatggaatatgttactacatgactagttatgatagaagtctatttcccttgaacatttctataatgctaaacagccgtatgatttcttccaatgttgcctatgccatacaatttgaatggaatctaaatgcaagtgaatctccagaaagcaacatagctacgctgaccacatccccctttttcttttcttacattacagaagacgacaactaa

SEQ ID NO: 104 - DNA, 273 bp, Unknown
  Description of Unknown: Human adenovirus 34 sequence
gacggagttcttactttaaaatgtttaaccccactaacaaccacaggcggatctctacagctaaaagtgggagggggacttacagtggatgacactgatggtaccttacaagaaaacatacgtgctacagcacccattactaaaaataatcactctgtagaactatccattggaaatggattagaaactcaaaacaataaactatgtgccaaattgggaaatgggttaaaatttaacaacggtgacatttgtataaaggatagtattaacacc

SEQ ID NO: 105 - DNA, 570 bp, Unknown
  Description of Unknown: Human adenovirus 34 sequence
ttatggactggaataaaccctccacctaactgtcaaattgtggaaaacactaatacaaatgatggcaaacttactttagtattagtaaaaaacggagggcttgttaatggctacgtgtctctagttggtgtatcagacactgtgaaccaaatgttcacacaaaagacagcaaacatccaattaagattatattttgactcttctggaaatctattaactgatgaatcagacttaaaaattccacttaaaaataaatcttctacagcgaccagtgaaactgtagccagcagcaaagcctttatgccaagtactacagcttatcccttcaacaccactactagggatagtgaaaactacattcatggaatatgttactacatgactagttatgatagaagtctatttcccttgaacatttctataatgctaaacagccgtatgatttcttccaatgttgcctatgccatacaatttgaatggaatctaaatgcaagtgaatctccagaaagcaacatagctacgctgaccacatccccctttttcttttcttacattacagaagacgacaac

SEQ ID NO: 106 - DNA, 1677 bp, Unknown
  Description of Unknown: Human adenovirus 34 sequence
atgaggcgagtcgtgctaggcggagcggtggtgtatccggagggtcctcctccttcgtacgagagcgtgatgcagcagcagcaggcgacggcggtgatgcaatccccactggaggctccctttgtgcctccgcgatacctggcacctacggagggcagaaacagcattcgttactcggaactggcacctcagtacgataccaccaggttgtatctggtggacaacaagtcggcggacattgcttctctgaactatcagaatgaccacagcaacttcttgaccacggtggtgcaaaacaatgactttacccctacggaagccagcacccagaccattaactttgatgaacgatcgcggtggggcggtcagctaaaaaccatcatgcatactaacatgcccaacgtgaacgagtatatgtttagtaacaagttcaaagcgcgtgtgatggtgtccagaaaacctcctgagggtgttagagtagacgataattatgatcataagcaagatattctaaaatacgagtggttcgagtttactttgccagaaggcaacttttcggtcactatgactatcgacttgatgaacaatgccatcatagacaattacttgaaagtgggcagacagaatggagtgttggaaagtgacattggtgttaagttcgacactaggaacttcaagttgggatgggatccagaaactaagttgatcatgcctggggtttacacctatgaggccttccatcctgacatcgtattgctgcctggctgcggagtggactttaccgaaagccgtctgagcaaccttcttggcattagaaagaaacacccattccaagagggttttaagatcttgtatgaggatttagaaggaggaaatattccagcccttttggatgtagatgcttatgagaacagcaagaaagatcaaaaagccaaaatagaagctgctgcagaagctaaagcaaacatagttgccaacgatccggtaagggtggctaacgctagtgaaatcaggggagacagttttgccgcaacatccgttccgactaaagaatcattattggatgatgtgtctcaaaacatagagttaaaactcactattaagcctgtggaaaaagatggcaaaaacagaagttacaatgtgttggaagataaaatcaacacggcctatcgcagttggtacctttcgtacaattatggcgaccccgaaaaaggagtgcgttcctggacattgctcaccacctcagatgtcacctgcggagcggagcaggtctactggtcgcttccagacatgatgcaggatcctgtcactttccgctccactagacaagtcagtaactaccctgtggtgggtgcagagcttatgcccgtcttttcaaagagcttctacaacgaacaagctgtgtactcccagcagctccgccagtccacctcgcttacgcacgtcttcaaccgctttcctgagaaccagattttaatccgtccgccggcgcccacaattaccaccgtcagtgaaaacgttcctgctctcacagatcacgggaccctgccgttgcgcagcagtatccggggagtccaacgtgtgaccgttactgacgccagacgccgcacctgtccctacgtgtacaaggcactgggcatagtcgcaccgcgcgtcctttcaagccgcactttctaa

SEQ ID NO: 107 - DNA, 2856 bp, Unknown
  Description of Unknown: Human adenovirus 34 sequence
atggccaccccatcgatgctgccccaatgggcatacatgcacatcgccggacaggatgcttcggagtacctgagtccgggtctggtgcagttcgcccgcgccacagacacctacttcaatctgggaaataagtttagaaatcctaccgtagcgccgacccacgatgtgaccaccgatcgtagccagcggctcatgttgcgcttcgtgcccgttgaccgggaggacaatacatactcttacaaagtgcggtacaccctggccgtgggcgacaacagagtgctggatatggccagcacgttctttgacattaggggcgtgttggacagaggtcccagttttaaaccctattctggtacggcttacaactccctggctcctaaaggcgctccaaatgcatctcagtggttggataagggagttacaagcactggcctagtggacgacggcaatactgatgatggggaagaagccaaaaaagcaacatacacttttggtaatgctccagtaaaagccgaggctgaaatcacaaaagacggattgccggtgggcttggaagtttcaactgaaggtcctaaaccaatctatgctgataagctttatcagccagaacctcaagtgggagacgaaacttggactgacctagacggaaaaaccgaagagtatggagggagggttcttaaacctgaaactaaaatgaaaccctgctacggatcttttgctaaacctactaatattaaaggaggtcaggcaaaggtaaaaccaaaagaagacgatggcactaacaacatcgagtatgacattgacatgaacttctttgacttaagatcacaaagatcagaactcaaacctaaaattgtaatgtatgcagaaaatgtggacctggaatgtccagatactcatgttgtgtacaaacctggagtttcagatgctagttctgagaccaatcttggacaacagtctatgcccaacagacccaactacattggcttcagagataacttcatcggacttatgtactataacagtactggcaacatgggggtactggctggccaagcgtctcagttgaatgcagtggttgacttgcaggacagaaacacagaactgtcttaccaactcttgcttgactctctgggcgacagaaccagatactttagcatgtggaatcaggctgtggacagttatgatcctgatgtacgtgttattgaaaatcatggtgtggaagatgaacttcccaactattgttttccgttggatggtgtcggtccgcgaacagatagttacaaggagattaagccaaatggagaccaatctacttggacaaatgtagacccaactggcagcagtgaacttgctaagggaaatccatttgccatggaaattaaccttcaagccaatctatggcgaagtttcctttattccaatgtggctctatatctcccagactcgtacaaatacaccccgtccaatgtcactcttccagaaaacaaaaacacctacgactacatgaacgggcgggtggtgccgccatctctagtagacacctatgtgaacattggtgccaggtggtctctggatgccatggacaatgtcaacccattcaaccaccaccgtaacgctggcttgcgttaccgatccatgcttctgggtaacggacgttatgtgcctttccacatacaagtgcctcaaaaattcttcgctgttaaaaacctgctgcttctcccaggctcctacacttatgagtggaactttaggaaggatgtaaacatggttctacagagttccctcggtaacgacctacgggtagatggcgccagcatcagttttacgagcatcaacctctatgctacttttttccccatggctcacaacaccgcttccacccttgaagccatgctgcggaatgacaccaatgatcagtcattcaacgactacctatctgcagctaacatgctctaccccattcctgccaatgcaaccaatattcccatttccattccttctcgcaactgggcggctttcagaggctggtcatttaccagactgaaaaccaaagaaactccctctttggggtctggatttgacccctacttcgtctattctggttctattccctacctggatggtaccttctacctgaaccacacttttaagaaggtttccatcatgtttgactcttcagtgagctggcctggaaatgacaggttactatctcctaacgaatttgaaataaagcgcactgtggatggcgaaggctacaacgtagcccaatgcaacatgaccaaagactggttcttggtacagatgctcgccaactacaacatcggctatcagggcttctacattccagaaggatacaaagatcgcatgtattcatttttcagaaacttccagcccatgagcaggcaggtggttgatgaggtcaattacaaagacttcaaggccgtcgccataccctaccaacacaacaactctggctttgtgggttacatggctccgaccatgcgtcaaggtcaaccctatcccgctaactatccctatccactcattggaacaactgccgtaaatagtgttacgcagaaaaagttcttgtgtgacagaaccatgtggcgcataccgttctcaagcaacttcatgtctatgggagcccttacagacttgggacagaacatgctctatgccaactcagctcatgctctggacatgacctttgaggtggatcccatggatgagcccaccctgctttatcttctcttcgaagttttcgacgtggtcagagtgcatcagccacaccgcggcatcatcgaggcagtctacctgcgtacaccgttctcggccggtaacgctaccacgtaa

SEQ ID NO: 108 - protein, 323 aa, Unknown
  Description of Unknown: Human adenovirus 34 sequence
MTKRVRLSDSFNPVYPYEDESTSQHPFINPGFISPNGFTQSPDGVLTLKCLTPLTTTGGSLQLKVGGGLTVDDTDGTLQENIRATAPITKNNHSVELSIGNGLETQNNKLCAKLGNGLKFNNGDICIKDSINTLWTGINPPPNCQIVENTNTNDGKLTLVLVKNGGLVNGYVSLVGVSDTVNQMFTQKTANIQLRLYFDSSGNLLTDESDLKIPLKNKSSTATSETVASSKAFMPSTTAYPFNTTTRDSENYIHGICYYMTSYDRSLFPLNISIMLNSRMISSNVAYAIQFEWNLNASESPESNIATLTTSPFFFSYITEDDN

SEQ ID NO: 109 - protein, 91 aa, Unknown
  Description of Unknown: Human adenovirus 34 sequence
DGVLTLKCLTPLTTTGGSLQLKVGGGLTVDDTDGTLQENIRATAPITKNNHSVELSIGNGLETQNNKLCAKLGNGLKFNNGDICIKDSINT

SEQ ID NO: 110 - protein, 190 aa, Unknown
  Description of Unknown: Human adenovirus 34 sequence
LWTGINPPPNCQIVENTNTNDGKLTLVLVKNGGLVNGYVSLVGVSDTVNQMFTQKTANIQLRLYFDSSGNLLTDESDLKIPLKNKSSTATSETVASSKAFMPSTTAYPFNTTTRDSENYIHGICYYMTSYDRSLFPLNISIMLNSRMISSNVAYAIQFEWNLNASESPESNIATLTTSPFFFSYITEDDN

SEQ ID NO: 111 - protein, 558 aa, Unknown
  Description of Unknown: Human adenovirus 34 sequence
MRRVVLGGAVVYPEGPPPSYESVMQQQQATAVMQSPLEAPFVPPRYLAPTEGRNSIRYSELAPQYDTTRLYLVDNKSADIASLNYQNDHSNFLTTVVQNNDFTPTEASTQTINFDERSRWGGQLKTIMHTNMPNVNEYMFSNKFKARVMVSRKPPEGVRVDDNYDHKQDILKYEWFEFTLPEGNFSVTMTIDLMNNAIIDNYLKVGRQNGVLESDIGVKFDTRNFKLGWDPETKLIMPGVYTYEAFHPDIVLLPGCGVDFTESRLSNLLGIRKKHPFQEGFKILYEDLEGGNIPALLDVDAYENSKKDQKAKIEAAAEAKANIVANDPVRVANASEIRGDSFAATSVPTKESLLDDVSQNIELKLTIKPVEKDGKNRSYNVLEDKINTAYRSWYLSYNYGDPEKGVRSWTLLTTSDVTCGAEQVYWSLPDMMQDPVTFRSTRQVSNYPVVGAELMPVFSKSFYNEQAVYSQQLRQSTSLTHVFNRFPENQILIRPPAPTITTVSENVPALTDHGTLPLRSSIRGVQRVTVTDARRRTCPYVYKALGIVAPRVLSSRTF

SEQ ID NO: 112 - protein, 951 aa, Unknown
  Description of Unknown: Human adenovirus 34 sequence
MATPSMLPQWAYMHIAGQDASEYLSPGLVQFARATDTYFNLGNKFRNPTVAPTHDVTTDRSQRLMLRFVPVDREDNTYSYKVRYTLAVGDNRVLDMASTFFDIRGVLDRGPSFKPYSGTAYNSLAPKGAPNASQWLDKGVTSTGLVDDGNTDDGEEAKKATYTFGNAPVKAEAEITKDGLPVGLEVSTEGPKPIYADKLYQPEPQVGDETWTDLDGKTEEYGGRVLKPETKMKPCYGSFAKPTNIKGGQAKVKPKEDDGTNNIEYDIDMNFFDLRSQRSELKPKIVMYAENVDLECPDTHVVYKPGVSDASSETNLGQQSMPNRPNYIGFRDNFIGLMYYNSTGNMGVLAGQASQLNAVVDLQDRNTELSYQLLLDSLGDRTRYFSMWNQAVDSYDPDVRVIENHGVEDELPNYCFPLDGVGPRTDSYKEIKPNGDQSTWTNVDPTGSSELAKGNPFAMEINLQANLWRSFLYSNVALYLPDSYKYTPSNVTLPENKNTYDYMNGRVVPPSLVDTYVNIGARWSLDAMDNVNPFNHHRNAGLRYRSMLLGNGRYVPFHIQVPQKFFAVKNLLLLPGSYTYEWNFRKDVNMVLQSSLGNDLRVDGASISFTSINLYATFFPMAHNTASTLEAMLRNDTNDQSFNDYLSAANMLYPIPANATNIPISIPSRNWAAFRGWSFTRLKTKETPSLGSGFDPYFVYSGSIPYLDGTFYLNHTFKKVSIMFDSSVSWPGNDRLLSPNEFEIKRTVDGEGYNVAQCNMTKDWFLVQMLANYNIGYQGFYIPEGYKDRMYSFFRNFQPMSRQVVDEVNYKDFKAVAIPYQHNNSGFVGYMAPTMRQGQPYPANYPYPLIGTTAVNSVTQKKFLCDRTMWRIPFSSNFMSMGALTDLGQNMLYANSAHALDMTFEVDPMDEPTLLYLLFEVFDVVRVHQPHRGIIEAVYLRTPFSAGNATT

SEQ ID NO: 113 - DNA, 159 bp, Unknown
  Description of Unknown: Human adenovirus D37 sequence
catcatcataatataccccacaaagtaaacaaaagttaatatgcaaatgagcttttgaattttaacggttttggggcggagccaacgctgattggacgagaagcggtgatgcaaataacgtcacgacgcacggctaacggccggcgcggaggcgtggcc

SEQ ID NO: 114 - DNA, 159 bp, Unknown
  Description of Unknown: Human adenovirus D37 sequence
ggccacgcctccgcgccggccgttagccgtgcgtcgtgacgttatttgcatcaccgcttctcgtccaatcagcgttggctccgccccaaaaccgttaaaattcaaaagctcatttgcatattaacttttgtttactttgtggggtatattatgatgatg

SEQ ID NO: 115 - DNA, 320 bp, Unknown
  Description of Unknown: Human adenovirus D37 sequence
taggccggaagcaagtcgcggggctaatgacgtataaaaaagcggactttagacccggaaacggccgattttcccgcggccacgcccggatatgaggtaattctgggcggatgcaagtgaaattaggtcattttggcgccaaaactgaatgaggaagtgaaaagtgaaaaatacctgtcccgcccagggcggaatatttaccgagggccgagagactttgaccgattacgtggggtttcgattgcggtgtttttttcgcgaatttccgcgtccgtgtgaaagtccggtgtttatgtcacagatcagctgatccacagggt

SEQ ID NO: 116 - DNA, 3388 bp, Unknown
  Description of Unknown: Human adenovirus D37 sequence
atttaaaccagttgagcccgtcaagaggccactcttgagtgccagcgagtagagatttctctgagctccgctcccaaagtgtgagaaaaatgagacacctgcgcctcctgtcttcaactgtgcctattaacatggccgcattattgctggaggactatgtgagtacagtattggaggacgaactacatccatctccatttgagctgggacctacacttcaggacctttatgatttggaggtagatgcccatgatgacgacccaaacgaagaggctgtgaatttaatatttccagaatctctgattcttcaggctgacatagccagcgaagctgtacctacaccacttcatacaccgactttgtcacccatacctgaattggaagaggaggacgagttagacctccgatgttatgaggaaggttttcctcccagcgattcagaggacgaacagggtgagcagagcatggctctaatctcagaatatgcttgtgtggttgtggaagagcattttgtgttggacaatcctgaggtgcccgggcaaggctgtagatcctgccagtaccaccgggataagaccggagacacaaacgcctcctgcgctctgtgttacatgaaaaagaacttcagctttatttacagtaagtggagtgaatgtgagagaggctgagtgcttaacacataactgggtgatgcttaaacagctgtgctaagtgtggtttatttttgtttctaggtccggtgtcagaggatgagtcatcaccctcagaagaaaaccacccgtgtccccctgagctgtcaggcgaaacgcccctgcaagtgcacaaacccaccccagtcagacccagtggcgagaggcgagcagctgttgaaaaaattgaggacttgttacatgacatgggtggggatgaacctttggacctgagcttgaaacgccccaggaactaggcgcagctgtgcttagtcatgtgtaaataaagttgtacaataaaagtatatgtgacgcatgcaaggtgtggtttatgactcatgggcggggcttagtcctatataagtggcaacacctgggcactgggcacagaccttcagggagttcctgatggatgtgtggactatccttgcagactttagcaagacacgccggcttgtagaggatagttcagacgggtgctccgggttctggagacactggtttggaactcctctatctcgactggtgtacacagttaagaaggattataacgaggaatttgaaaatctttttgctgattgctctggcctgctagattctctgaatctcggccaccagtcccttttccaggaaagggtactccacagccttgatttttccagcccagggcgcactacagccggggttgcttttgtggtttttctggttgacaaatggagccagaacacccaactgagcaggggctacattctggacttcgcagccatgcacctgtggagggcatgggtgaggcagcggggacagagaatcttgaactactggcttatacagccagcagctccgggtcttcttcgtctacacagacaaacatccatgttggaggaagaaatgaggcaggccatggacgagaacccgaggagcggcctggaccctccgtcggaagaggagctggattgaatcaggtatccagcttgtacccagagcttagcaaggtgctgacatccatggctaggggagtgaagagggagaggagcgatgggggcaataccgggatgatgaccgagctgacggccagcctgatgaatcgcaagcgcccagagcgcattacctggcacgagctacagatggagtgcagggatgagttgggcctgatgcaggataaatatggcctggagcagataaaaacacattggttgaacccagatgaggattgggaggaggccattaagaaatatgccaagatagccctgcgcccagattgcaagtacatagtgaccaagaccgtgaatattagacatgcctgctacatttcagggaacggggcagaggtggtcatcgataccctggacaaggccgccttcaggtgttgcatgatgggaatgagagcaggagtgatgaatatgaattccatgatcttcatgaacatgaagttcaatggagagaagtttaatggggtgctgttcatggccaacagccacatgaccctgcatggctgcagtttctttggcttcaacaatatgtgcgccgaggtctggggcgcttccaagatcaggggatgtaagttttatggctgctggatgggcgtggtcggaagacctaagagcgagatgtctgtgaagcagtgtgtgtttgagaaatgctacctgggagtctctaccgagggcaatgctagagtgagacactgctcttccctggatacgggctgcttctgcctggtgaagggtacggcctctctgaagcataatatggtgaagggctgcacagatgagcgcatgtacaacatgctaacatgcgactcgggggtctgtcatatcctgaagaacatccatgtgacctcccaccccagaaagaagtggccagtgtttgagaataacctgctgatcaagtgccatatgcacctgggtgccagaaggggcaccttccagccgtaccagtgcaactttagccagaccaagctgctgttggaaaacgatgccttctccagggtgaacctgaacggcatctttgacatggatgtctcggtgtacaagatcctgagatacgatgagaccaagtccagggtgcgcgcttgcgagtgcgggggcagacacaccaggatgcagccagtggccctggatgtgaccgaggagctgagaccagaccacctggtgatggcctgtaccgggaccgagttcagctccagtggggaggacacagattagaggtaggtttgagtagtgggcgtggctaatgtgagtataaaggcgggtgtcttacgagggtctttttgcttttctgcagacatcatgaacgggaccggcggggccttcgaaggggggctttttagcccttatttgacaacccgcctgccgggatgggccggagttcgtcagaatgtgatgggatctacggtggatgggcgtccagtgcttccagcaaattcctcgaccatgacctacgcgaccgtggggagctcgtcgcttgacagcaccgccgcagccgcggcagccgcagccgccatgacagcgacgagactggcctcgagctatatgcccagcagcggtagcagcccctctgtgcccagttccatcatcgccgaggagaaactgctggccctgctggccgagctggaagccctgagccgccagctggccgccctgacccagcaggtgtccgatctccgcgagcaacagcagcagcaaaataaatgattcaataaa

SEQ ID NO: 117 - DNA, 18876 bp, Unknown
  Description of Unknown: Human adenovirus D37 sequence
atggccggcggcagtcaggacgtgcgccggttcatggagcgagaggccactccgccccggggccacgggtcggcgcgctatccgccggagcaggagaggagcccctcgccgccgccacctcctctgcccaccaagcgccgaaagtatcagcgggtgggctccgggtcttccgaggaggacgtggtccccgtggacagccctccaaaaaagaagcaagccagaaagaccaagcatgtgaccaaggtagaccccgacgaagagatgccccaggaagacgccgtgatcgtgggagtgggattcagccagcctccggttctgttgaaggaaggcaaggacggaaaacgcatcgtcgagcccgcgacccctggtgtcctgaacgtgcgcaaccccctgagtctgcctctggtctcgtcatgggagaagggcatggataccatgaacgtgctgatggaacgctaccgcgtcgacagcggcttgcgcgatgcttacaagctcatgccggagcagaccgagatcttccagaagatgtgccagacctggatgaacgaggaggcccgcgggatgcaactgacattcaccacccagaaagcatttagcaccattatgggtcgcctgttgcaaggttacattttcagccacagcgggatcgcgcacaagaattgggagtgcaccggctgcgtcctgtgggatcacggctgcaccgaggtggaaggtcagctcaagtgtctgcatggaacggtgatgattcacaaggaccacgtggtggagatggatgtgaccagcgagaacggacagcgcgcgctgaaggagcagcccagcaaggctaaggtgacccagaaccgctggggacggagcgtggtgcaactgaccagccatgacgcgcgctgctgcgtgcatgatgccgggtgcgggaataaccagttcagcgggaagagctgcggcctgttttttagcgagggggccaaggcccagcaagctttcaagcagatcgcggccttcgtcaaggccctctacccgaatatgcagcgcggcgcggggatgatgctgatgcccgtgcactgcgagtgtaaccacaagcctcagagcgtgcccttcctgggccgccagctgtgcaagatgaccccgttcggcctgagcaacgccgaggacctggacaaggatcagattagcgacaagagcgtgcttgccagtgtgaagtaccccagtctgatggtgttccagtgctgcaaccccgtgtaccgcaactcgcgcgcgcagagcaccggtcccaactgcgatttcaagatctccggccctgacatgctgggcgccctgcaaatgagccggcgcatgtggagcgagaccttccccgagactccagtgcccaaactggtgatccccgagttcaagtggcagcccaagttccagtaccgcaacgtggccctccccagcgcggcgcacaacgacgagcgcgagaaccccttcgacttttaaataacttgcatatactccagcgcatgtgtaaaataaaagtgctgtttatttgagtcatacacgcagttgtttcattttatcaaaagcggtggcgtgttcgatggcggcgcggtgggagcgaaagtagggggagtggcgcgcgaggaagcggtagagctcctcctggttgcgcctgagggtgggcagcacctgtggcgattgtagcatgccgttgggcacccccgtcagcaagttcatggtggggttcccgtccatgggtcggtcgggccagtgcacgaaggcatgcaagaacatgcaacagaagagtccgcaggcggcggagtcgggcccctgcacggtctgggtggactgttcgaggctaagacagcgatcgggcgaggaggccagggcgcttcggcgcagcatggcctcgtactcgaagctgtaaatctgcttgagccggcggtccgagaacccgaaggggtcgaacatgtagcaggtgcgcgagcgcgggttccagccaaaggcgagccagtgcacgcccccggtctcgcggccggccgtgttgacgatggcgcaggccagcttgtcgccggcgaggaagcccgggaagcgcttgtcgtgggtgcccaaaaagtagggcccgcagcccaggtcgcgcacgatggccgcgagctctcgttcgctggagccgctcatgcttaggtggtggcgttgccggcggagaagggcgtgcgcaggtagacggcctcgatgacgccgcggtgcggctggtgcactctgaccacgtcgaaaacttcgaagagaagatagaggagggtgggctcatccatggggtccacctcgaaggtcatgtcgagcgcgtgggccgagttggcgtagagcatgttctgacccaggtcggtgagggcgcccatggacatgaagttgctggagaaggggatgcgccacatgaccctgtcgcagaggaactttttctgggtgacggatggcactgcggtggagccgatgagcgggtaggggaagttggcggggtagggctgcccctgacgcatggtgggtgccaggtagccggtgaagccagagttgttgtgctggaagggcagggtgactgccttgtagtccttgtagttgatctcatcgaccacctgcctgctcatgggctggaagttgcggaagaaggagtacatgcggtccttgtagccctcgggcacatggaagccctggtagccgatgttgtagtgggagagcatctggacgaggaaccagtccttggtcatgttgcattgggccacgttgtagccctccccgtcgacgctgcgcttgatctcgaactcgttcggcgtaagcagccggtcgttgccgggccagctgaccgaggagtcgaacatgatggaaaccttcttgaaggtgtggttgaggtagaaggtcccgtcgaggtaggggatggagcccgagtagacaaagtaggggtcaaaacccgagccaagggagggagtttccttggtcttgagccgggtgaaactccagccgcggaaggcggcccagttgcgcgaggggatggaaatgggcacgttggtggccttggccgggatggggtagagcatgttggcggccgagaggtagtcgttgaaggactggtcgttggtgtcgttgcgcagcatggcttccagggtggaggcggtgttgtgcgccatggggaagaaggtggcgtagaggttgacgctgtcgaagcggacggaggcgccgtcgacgcgcaggtcgtttccgagggaactctgcaggatcatgttgacatccttgcggaagttccactcgtaggtgtaggagccggggagcaggagcaggttcttgatggcaaagaacttttggggcacttggatgtggaagggcacgtagcggccattgcccaaaagcatggagcggtagcgcaggcccgcattgcggtggtggttaaaggggttgacgttgtccatggggtccagcgaccagcgggcgccgatgttaatgtaggcgtccaccagcgagggggctaccacgcggccgttcatgtactcataggtgttggtgttggcgggcagcgtgacgttggccggcgtgtacttgtaggagtcgggcaggtacagggccacgttcgagtacagaaaactcttccacaggttggcctggaggttgatctccatggcaaagatgttgccctttccaatttgattatgggctgaaatgtcatcatcctttacccaatctccattaactccgcctcctgtttgatcaggctttagtttaacaccttgataggctgaattagtttgaacaccgtccaaggggaagcaatagttaggaagttcatcttccacaccgtggttctcaatgatcctgacatcgggatcatagctgtccaccgcagagttccacatactaaaatatctggttctgtcaccaagagaatctagcaagagctggtaagacagttcggtgtttctgtcttgcaagtcgaccacggcattcaactgagaagcctgaccagccagcacacccatgttgccagtgctgttgtagtacaatagccccacaaagttgtctctgaagccaatgtagtttggtctgttaggcatggactgctgagttaaattagcttcagaactgtcatcctctttgcctggtttgtacaccacatgtgtatctggagtttccaaatctacattttcagtgtacaacaccacatctggtatatttatagtgcttgagtcaaagaaagccatgtccacatcgtattgaggatcggtaccattgggtgtttctttcaatttagcctgcccaccttccttgtttgtgggtttagcaaatgaaccatagcatggcttcattttggtatcttttttaagagccctgccgccataatattcatcattatcctgccagttttcttctccaacttgaggttctggctggaaagttttgtctgcatagattggtttttcagcatttgctgttttgtcagttccaatctgcaaaccgtctttagaaatattactgcctcccatggcggcaagtccaaatgtctttgtaacatctttttctgctccagttcctccgttttgcttttctttggtagtccactgactgggattgggggcgcccttgggggccaggctgttgtaagccgtgcccgagtagggtttgaagcttgggccgcggtccaggacgccgcggatgtcaaagtaagtgctggccatgtctagcacccggttgtcgcccacggccagagtgaagcgcgccttgtacgagtacgtggtgtcctcgcgatccacgggcacaaagcgcagcgtcagacgctgggaccggtccgtggtcacatcgtgggtgggagccaccgtggggttcctaaacttgttgcccaggctgaagtacgtgtcggtggcgcgggcaaactgcaccagacccgggctcaggtactccgaggcgtcctgcccggcgatgtgcatgtacgcccactgcggcatcatcgagggggtggccatcttcgcgcgttctctggcggtaaggcacatacaagttaagctctccctttagtgtcctctttactctctctcaatagcatcggcggcgcttcagacttttcactcccaggcccacgatactgtgcagcgtgctctgccagttctgggcctggcggcgggcggggacgcggcgcacggcggtcgccaccggagggggctgcacaaccggagctgcttttggtggagcgggcgtgggtggtggaggcaggtcaagggtagcgggtttcattacacccgtggccagcggcgcgatgatgcgcgtggtgggcatgccggccttgacggcctcctcgtacgagggcggctcgtccacttgcaggattgtctcctccgcgtcgggccgcggtcgcttctcgcccttgggcggcggaagagttgcatcttccatctccaccaccgtgggcggccgcgggtccaggcggctgtttatctcgcgctgcacggcctggttcgcgatgtccaccaccccgttaatgcccgaggccagcccgtccaccaccttttgctggaagttctggtctttgagcttttcccttaacaactgcccagtgctactattccaggccttgttcccataggtccggagcgtcgagccgaaatttttaagcccgctccagacactgctccaattgaaggcgcccccgttcagctggctggtgccgatctcgttccaggtgcccatgaacggccgcgtgccgtgccgcggagccagggacgcaaaattgatgtcttccattctaaaaatatacaggaccaggtgtgtcagagtctaaagaggctttattcgcacatcaacggcgctgcgacgcctgcagcgcaacggaagctatgcccgggatcgtgccgatggccgcggcgattatggggatgagcgcgggcagaaagccgccactcaggcgcctgcgcatggcccgccgccggcggcggttcaggccactgcctgccatgcctctcctgcggcgggatcttcctcggtaattcgggacggggatgcgcaggcggcaagtgagagccatctctctgcaacagtatcacagcacacggattaaaggatgctggggtggtagcgcacggtgggcagaacgagcgagcggccccgccgcgtggtcacgcggcgcacgcgggcgggggccagacggcggcgggtggcggtgcggcggcggcgtttgctggctgggcgcctgcggctggcgtagtaccgggtgccgcggtagcctggcgtcgggatgatggaaggatgcaacacgtagttgggcatcagccggctggcggcgccccatcttcgcctcctgggaggctcggtagccgtggcggcggtagaagtggacgcggtagcggtggaggctgggagccaggggtcggtttgcacctcgatgctggtcgagggttttttgtcgacatccatgtcggtggggatctgaatgtccacggtttgcacgcccaggcccggcgccacctgcttgatggggcgcaccttgacctcgggctccacatccatttttacggtgtccagcacgtcctccacgcgccggcgcttgggcaccatgatctgcatggtcgggtacatgctctcgccctcgcgcttgaccccgcggctcggcagcagcactgcctggggcagcacctgctgcagggtcacgggctttaggctcggcgtggggttgctttcgtccagcggcagcgagatcagctcctcttcgcgcgaccgcttcccgtaggcgaactcgcccgcccgctccgccgcctggtccaggatgtcgtcgtcgccgtacacctcgtcatagctacgcttgctcctgaccgaggaccgctcgccgggcgtgaacaccaccgccgtgccgggccgcaacacacgctgcaccctgcgccccttccaatttacgcgccgccgcggagcgaactcgcgcacaaactctactgccccctcgtccacctcatccttttttttaacccgcttgattttgcggggtttctggtccgcctggggtggtccgtaaatctccggggcgacgacctggagcatctcctccttgattttgcgctttgacatcgtcgcttgcgggggaggacacaagcattagatcagggacgaggaggacgggtgcgcacgggcacgcgcacgcccgtgacggagtcgcgcacccagtacacgtttccgcgcctgggtctggtcatgctagagatggccgcggcggcggcagcggccgctcgtctgcgagtcctgcctgcgggggtgggtgcagtggcagcgcggcgcgcggctcgcatcatggcccggcggcccgtgcgtctggcgcggcgcagcagagctcgggcggcgcgcatggcgggcgtgctccggtggcgcctggcgatccgtcgccgccggctcttgcgtctggcatagtcacgcgcgtctgccaccacgctgtcgatgaccgcgtccacggtcgagggggcgggggtgtagttgcgcgcatcggcgaccaccgagtcgatgacgtcgtcgacggtggtgcgcacggcggcaggagcagaggtccgcccccgcttgtaagcgccccagggagcgcggaagtgaccgcggacgcggacggggtgctgctgggagcgtttcttggctcctccgtacatggtgctgggcctagtaagaccccagccggtgttattgctgggcgagatgagaatagacattttttagaaggtgcgactggaaagcacgcgcggcgcgactatgcccagggccttgtagacgtagggacaggtgcggcgacgggcgtcagtgacggtcactcgctggactccgcggatactgctgcgcagcggtagcgtcccgtgatctgtgagagcaggcacgttttcactgacggtggtgatggtgggcgcgggcgggcggcaaaggatctggttgtcggggaagcggttgaagacgtgggtgagggaggtgtagctgcggatgagctgggagtagacggcgaggtcgttgtaaaagctcttggcgcggaagggcatgagctcggcgccgaccacggggtagttgctgacttgctgggtagagcggaaggtgacggggtcttgcatgaggtccggcagcgaccagtagacttgctccgcgccgcaggtgacgtccggggtggtgagcagcgtccacgactgcacccccttctcgggatccccgtaggtataggacaggtaccaactgcggtacagggtgtctgtggttccctcgatcacattgtagcttctgtctgaatcatctttcaaaatggccttcaactcaatttcttttcctgctgctttggcttctgccgctgatgcatagttatctcctcttgggacggcatcattctgagccttaatagtatttgcatctgctttgccagcttcttccttatccttcagatactccttgacattcaggagagcggggatgttgccccctactaggtcctcatacatgattctgaagccctcttgaaaaggttgcttcttgcgaatgcccaggaggttgctcaggcggctctcggtgaaatccaccccgcagcccggcagcagcaccacgtccgggtggaaggcctcgtaggtgtagacccctggcatcaccagcttggtcaccgggtcccagcccagcttgaaatttctgctgtcaaacttgactccgatatcactctccagcacgccattttgccgccccacttgcaagtagttttccaagatggcgttgttcattaggtctatggtcatggtctcggaaaagttgccctcgggcagggtaaactcaaaccactgatactctaagatatccttgctcctatcatttgcatcagccccttccgccttttttctagccaccatcacccgcgccttaaacttgctggtgaacatgtactcgttcacattaggcatgttggtgtgcagaatggtcttcagatcaccgccccaccgcgaccgctcgtcaaaatttatcgtctgcgtgctggcctcggcaggggtgaaatcgttgttctgcaccaccgtggtcaggaagttgctgtggtcgttttggtagttcagggaagcgatgtccgccgacttgttgtccaccaaatacacgcgagtggtgtcgtacagcggagccagctccgagtaacgaatgctgtttctgccctccgtaggagccatataccgcggaggcacaaacggaacctccagggtcgcctgcgccatcacgctctcgtacgagggaggaggagaggaagacaccaccgcgcgcctcatctctaacaaggaagagaacgcacgctatggccttggtgagttttattttgcattcaaaacatccgtcgccccagtctgggctgcagatgcgcgaacgggttggccccaccgctcccgcccaagtccaacacgctgctatcgtcggccgagtcctcgtcgtcccacaccaggccccgctgccggtcgtgacgctgtcgccgcggcgcgggcgcaggttccctatggtcctgagcgtaggttttccagcggttcagtttgtccaccagactctctatcccgttattgaccatggcgttcttgacccgcggcggctgcagcagcgagtcgttcaggtactcgtcctcgcccagcaagcgcggccggctcaccctgccgctgttcaccgagcccggcaagctatgcaaactccctaagctaggaaaggggctccgacccaccgcgccctcgctcgcgggcgtgcgcaccgcctcctggcgcttttgcaaggtcggtgagaacaccgcgctgtccacgtcgtcccacaaaaacccgtcgttggggtcaggcatgtcgtactcgcccgtgtagaaccccggcggcgggagccagtgcgggttcaagatggcattggtaaagtagtccgagttcatggacgccgcgcggtgcaggtagtccatcagcttattaataaacggccggttggcggcgtacatgctaggttccatgttgcgcgcggtcatgtccagcgcggcgctgggggtggccccctcctgcatcaggaacagccctacgctctgctgcacatatctcaggatgcgctcctcctcggccgacagcgcgtactgcgccgggatcttctgctgtctattggtcagcaagaagttcagggtggccctcagactgtcggtgtcgttctgacccagcgcgcggctcacgctagtgatctcctggaaggtctgctcatccacctgcgcctggcctatggcctcgcggtacagcgtcagcaggtgacccaggtacgagttgcggttcacgctgccactgtcggtgaagggcgcgatcagcagcagcagcagccgcgagttgggcgtcagcaagctgctcaccgtcgaccggtcgcccacgggcgcctgcacgccccacagcccgcgcaggttcttgaaagcctgactcaggttcaccgtctgcaggccctgtctgctcgtctggaaaaagtagtccgggcccgactggtacacctcgctctggggcacctcggtcaccatcagccgcagcgcgcttataaagttggtataatcatcctgcccgcgcggcacgttcgccggctgcgtcgccaggaaggcgttcagcgccaccagcgaacccaggccctcgttcttgaaccgctcgcgctgcgccacggcctcgcgcacgtccgtcaccagccggtccaggttggactgcacgtttgtgctgttgtagcggcccacgcgctccagcagggcgttgtacactagcccggcctcgtcgggacggatggccttgttctccgccagcgcgttcacgatcgccagcaccttctcgtgcgtggggttggtccgagaaggaaccaccgcctccagaatggccgagagtctgttggcctgcggctgttgtctaaaggactcggggttgcgggtcgtcagggccatgatgcgttgcatcgcggcctcccagtcgtccgatgctagaccggacggctggctttgcagcgccgcccttatggcggggtccggggcttgctgcatctaaaaacacatcacggaggcgtcagtaccccgcaacgggtgcatcctcctcctcttcctcttcctcatccaagtcctctggaccgtaggcggcctccaaggcgcgtcggctcggctgccaatgcaggtccgcccccatgtcaaagtaggactcctcaccgccggtggcgcctcctaccagcgcccggcgcagactcagcatcagctcgcggtcgctcagctcgcgccgccggcttgtgctcacggccttgtggatgcggtcgttgcggtacacgcccaggtcgtcgctcagcgtcagcaccttgagcgccatgcgcatgtaaaagctgtctatcttcacctccttgtctatgggcacatacggcgtcttgtaaatcttgcgcgcgtaaaacttgcccaggctcagcaccgagtagttgatcgccgccaccttctcggccaggctcaggctgcgctcctgcactacgatgctctgcaagatgttaatcagctccagcagccagcgaccctcgggctcggcgatgttcagcagtgcctccctgaacgcctcgttgtccctgctgtgctgcaccaccaggaacagctgtgccgtcagaggcttgctgtccgggttctgcacgatggcctccgccaggtcccacaggtgcatcaggcccagggccacctcctcgcgcgcgatcagggtgcgcacgtggttgttgaaactcttttggaagttgcgctcctgcttcaccgtctgctcgtaggccgtcaccaggttggccgccgccacgtgcgcgcgcgcggggctgatccccgtctgctcgttcggctcgaaatcctcgtcgcgcagcacgcgctggcggtccaggccctcgcgcagctccctgcccgcccgaaaccggcagtcgcgcatctcctcgggctcctccccgctgcggtccctgaacaggttctgcgcaggcacgtacgccgggcgcacgtccttctgcagctgcacgcggggatgtcgctccggggacggcgcccccagtctcgccagcccttcgccctcttccaagtccatctctgtctgtggctgtggctggctagcgccggcgcctgctacggccgcggtcgcggtggtcgccgggggggtgggacgcatttggcgcaggacgggatgcatctggcaaaaagaaaaaagggggctcgctcccgtaactggagaagtcggctggctgtgggtctttaaatcggcggggtgaccaagtcccgctcgccgcggccgtccttgaaccgggttctgccgcgactcaaccctggcgatgcttctccagactacgggcgcgagccactacccggcagggttttcggccgctttcaagtctagcgactcccctcggccgacaaaaagggctctccgccgtatcctggcggctatcgggcttgggtcgagacgggagtgccaataccacgttagtcgcggctccagcctgattcgaggggactcgaaccggggtacacacgcggcctaacccgtttgcgttccgccaggctacggaggaagagcccgctcaaccgctttcgtttttgcctctagagcatcaatgactgcgcgcgtctcaccggccagaccgtgccgaccatggactatttcctgcccctgcgcaacatctggaaccgcgtccgcgagttcccgcgcgcctccaccaccgccgccggcatcacctggatgtcccgctacctctacggctaccaccgactcatgcttgaggacctggccccgggcgcgccggccacccagcgctggccgctctaccgccagccgccgccgcactttctagtcggataccagtacctcgtgcgcacctgcaacgactatgtcttcgactcgcgcgccttctcgcggctcaggtactccgaggtcgtgcaacccggcctgcagaccgtcaactggtcgcttatggccaactgcacttacaccatcaacacaggggcctaccaccgcttcgtcgacatggacgacttccaggacaccctcacccgcgtgcaacaggccatcctcgccgagcgcgtcgtcgccgacctggcgctcgtgcagccgttcaggggcgtcggggtcacccgcatggaagactccgcctccgccagtgatgacatcgagaggctcatgcatgactactacaagaacctgagccggtgtcagggccaggcctggggcatggccgagcggctccgcatccagcaagcgggacccaaggacctggtcctcctcgccaccatccgccgcctcaaaaacgcctacttcaattacatcatcagcaaccgcaattctaacagcgtccacagggctgctacgtgtttgagcttaccttgcgactgcgattggctagacgctttcctcgaaagattctccgatccggtcgatctcgacgcgctcacgtgccctacaccgcaattgataagatgcattgtcagcgccctatcgctgcccaacggggacccaccccattaccgggagatgaccggcggcgtcttcacgctgcgtcctcgcgaacggggtcgcgccgtcaccgaaaccatgcgtcgccgccgcggggagatgatcgagcgcttcgtcgaccgtctcccggtgcgtcgccgtcgtcgtcgggccccgccaccaccaccgcccccagaggaagaaatagaagaagaggtcgtcatggaagaagaggaagaggaggaggcccccggggatttcgagcgcgaggtgcgcgccaccatcgccgaactcatcaggctcctggaagacgagctcacggtctcggcccgcaacgcccagtttttcaacttcgccgtggatttctacgaggccatggaaaggctggaggccattggcgacatcagcgaaatgcccctgcgccgctggattatgtacttcttcgtcaccgagcacatcgccaccaccctcaactacctcttccaacgcctgcgcaactatgccgtcttcgcgcggcacgtggagctcaacctcgcgcaggtggtcatgcgcgcgcgcgacgccgacggggacgtggtttacagccgcgtctggaacgagagcggcctgggcgccttctcgcagctcatgggtcgcatctcgaatgaccttgccgccaccgtagagcgcgcgggccgcggcgatctccaggaggaggaaatcgagcagttcatgtccgagatcgcctaccaggacaactcgggcgacgtgcaagagatcctgcgtcaggccgccgtcaatgacgccgagattgattctgttgaactgtctttcaggttcaaagtcacggggcccgtggtcttcacgcaaaggcggcagatccaggatgtcaaccgccgcgtcgtcgcgcacgccagcgctctcagggcgcagcaccgggacctgcccgagcgccacgccgacgtgcctctaccgccactgcccgcggggccggaaccgccgctgccgccgggagcgcgtccgcgacaccgcttctaaaagcgcaccgcggcacggtcgtggccccgcgcagctacgggctcatgcaatgcgtggacacgaccaccaactcacccgtggagatcaagtaccatctgcatctcaagcacgccctcacccgcctctacgaggtcaacctcagaaccctgcccccggacctggatctccgcgacaccatggacagctcccaactgcgcgccctcgttttcgctctccgcccccgccgcgccgagatctggacctggctcccgcgcgggctcgtcagcctctccgtcctcgaggagccccagggtgagtcccacgcaggcgaacatgaaaaccaccagccagggccgccactcctgaagttcctcctcaagggacgcgctgtgtatctcgtggatgaggtacagcccgtgcagcgctgcgagtactgcggacgcttttacaagcatcagcacgagtgctcggttcgccggcgggatttctactttcatcacatcaacagccactcgaccaactggtggcaggaaatccagttcttcccaatcggctctcatcctcgcacggagcggctctttgtcacctacgatgtagaaacctacacctggatggggtccttcggcaagcagctcgtccccttcatgctggtcatgaaattctccggggaccccgagctggtcgccctcgctcgcgatctcgccgtgcgcttacgctgggatcgctgggagcgggaccccctcaccttctactgcgtcaccccagaaaagatggccgtgggccagcagttccgcctctttcgcgacgagctccagaccctcatggcccgcgagctctgggcttcattcatgcaagccaacccacatctccaggagtgggcgctcgagcagcacggcctgcaatgccccgaggacctcacctacgaggaactcaaaaagctgccgcacatcaaaggccgcccgcgattcatggaactctacatcgtcgggcacaacatcaacggcttcgacgagatcgtcctcgccgcccaggtcatcaacaaccgagcctccgttccgggccctttccgcatcacccgcaatttcatgccgcgggcaggcaagattctcttcaatgacgtcactttcgctctgcctaaccccctctcgaagaagcgcaccgatttcgagctctgggagcacggcggctgcgacgactcggatttcaagtaccagttcttgaaagtcatggttagggataccttcgccctgacgcacacctcgctccgcaaggccgctcaagcttacgccctccccgtggagaagggctgctgtccctacaaggccgtgaaccatttctacatgctgggctcttaccgtgcggacgatcgaggattcccgctccgggagtactggaaggatgacgaggagtacgccctcaaccgcgcgctgtgggagaagaaagaagaggcgggttatgacatcatccgtgaaacgctggactactgcgccatggacgtccttgtcaccgccgagctcgttgccaagctgcaagactcctacgcgcacttcatccgcgactcggtccgcttgccccacgcccactttaacatcttccaacggcccaccatctcctccaactcgcatgccatctttcgccagatcgtcttccgcgccgagcagccccagcgcaccaatctcggccccgctttcttggccccctcgcacgagttgtatgactatgtgcgcgccagcatccgcggggggcgctgttatcccacctacatcggcatcctctcggagcccatctatgtctacgacatctgcggcatgtacgcctccgccctcacgcatcccatgccctggggtccgcccctcaacccctacgagcgagcgctggccgcccgcgagtggcagatggccttggatgatgcatcctcaaaaatcgattattttgacaaggaactctgtccgggcatcttcaccatcgatgcggacccccctgacgagcatctgcttgatgtgctgcccccgttctgctcgcgcaagggcggacgcctctgctggaccaacgagcccctgcgcggcgaggtggccaccagcgtggacctggtcaccctgcataatcgcggctggcgcgtcaggatcgtgcccgacgagcgcaccaccgtcttcccagaatggaagtgtgtcgcgcgcgagtatgtccagctcaacatcgcggccaaggagcgcgccgaccgtgacaaaaatcagaccatgagatccatcgccaagcttctctccaacgccctctatggctcctttgccaccaagcttgacaataaaaaaatagtcttttctgaccagatggatgaaagtctcctaaaaagcattgcggcagggcaggccaacatcaaatcctcctcgtttctagaaactgacaacctgagtgccgaggtcatgcccgctctcgagagggaatacctaccccaacagctggcgctcgtggacagcgacgcggaagagagtgaggacgagcacagacccgcccccttttatacccccccgtcggggacccccggtcacgtggcctacacctacaagccaatcaccttcttggatgcggaggagggggacatgtgtctgcacacggtggaaaaggtggaccccctggtggacaacgaccgctacccctcgcacgtggcctcctttgtcttggcgtggacgcgcgcctttgtctcagagtggtccgagtttctctacgaggaggaccgcgggacgcccctgcaggacaggccaatcaagtccgtctacggggacacagacagcctgtttgtcaccgaacgcggacacagactcatggagacgcgaggtaagaagcgcatcaaaaagaacgggggaaaactggtttttgaccccgagcagcccgagctcacctggctcgtcgagtgcgaaaccgtctgcgcccactgcggagcggacgccttcgctcccgagtccgtctttctcgcacccaagctctacgccctgcaatccctcctctgtcccgcctgcgggcgctcttccaaaggcaagctccgtgccaagggccacgccgccgaggcccttaactacaagctcatggtcaactgctatctcgccgacgcgcagggcgaagaccgtgcccgtttcagcaccagcaggatgagtctcaagcgcacccttgcaagcgcccagcccggggcccaccccttcaccgtgacggagaccaccctcactcggaccctgagaccctggaaggacatgacgctggccgcgctggacgcccatcgtctcgtgccctacagtcgcagtcgtcccaacccccgaaacgaggaagtctgctggatcgagatgccgtagagcacgtcaccgagctatgggaccgcctggagctcctctcgcagacccttgccaagatgcccatggccgacgggctcaagcccctgaaaaactttgcttccctgcaagagctgctctcgctgggcggggaccgcctcctcggcgagctcgtccgggaaaacctccaagtgagagacatgctcaacgaggtggcccccctcctccgggacgacggcagctgcatctccttgaactaccacctgcaacccgtcatcggggtcatctacggcccgaccgggtgcggcaagtcccagctgttaagaaacctgctctcctcgcagctcatcacccccgccccggaaaccgtttttttcatcgccccgcaggtggacatgatccccccctccgagatgaaagcctgggagatgcagatctgcgaggggaacttcgccccggggcccgagggaacgatcgtcccccaatctggcacccttcgccccaaattcattaaaatgtcttatgatgatctcacccaggagcataattatgatgtctctgaccccagaaacgtttttgccaaagccgcagcccacgggcccattgccatcatcatggatgagtgcatggaaaacctgggcgggcacaagggcgtctccaaattcttccacgcattcccttccaagttgcatgataagttccccaagtgcacgggctacaccgttctggtggtcctgcacaatatgaacccccggcgggatctgggtggcaacatcgccaacctcaagatccaggccaaactgcacatcatctccccccgcatgcatccctcccagcttaaccgctttgccaacacctacaccaaggggctccccgtggccatcagtctcctcctcaaggacatcatccagcaccacgcccagcgcccctgctatgactggattatctacaacacgaccccagagcacgaggccatgcagtggtgctacctccacccccgggacgggctcatgcccatgtacctcaacatccaatcccacctctaccgggtcctggaaaaaatccaccgcactctcaatgatcgggagaggtggaccagggcctaccgcgcgcgaaaaaataaataa

SEQ ID NO: 118 - DNA, 4574 bp, Unknown
  Description of Unknown: Human adenovirus D37 sequence
atgtcctatggtgactcggctgagctcgctcggttgaggcatctggaccactgccgccgcctgcgctgctttgcccgggagagctacggcctcatctactttgagctgcccgaggagcaccccaacggccctgcacacggagtgcggatcaccgtagagggcaccaccgagtctcacctggtcaggttcttcacccagcaacccttcctggtcgagcgggaccggggcgccaccacctacaccgtctactgcatttgtcctaccccgaagttgcatgagaatttttgttgtactctttgtggtgagtttaataaaagctaaactcttgcaatactctggaccttgtcgtcatcaactcaacgagaccgtctacctcaccaaccagactgaggtaaaacttacctgcagaccacacaagacctatatcatctggttcttcgagaacacctcatttgcagtctccaacactcactgcaacgacggtgttgaacttcccaacaacctttccagtggactgagttacaatacacgtagagctaagctcatcctctacaatccttttgtagagggaacctaccagtgccagagcggaccttgcttccacagttttactttggtgaacgttaccggcagcagcacagccgctccagaaactaaccttccttctgatactatcaaaccttgtttcggaggtgagctaaggcttcccccttctcaggagggggttagcccatacgaagtggtcgggtatttgattttaggggtggtcctgggtgggtgcatagcggtgctagctcagctgccttgctgggtggaaatcaaaatctttatatgctgggtaagacattgtggggaggaactatgaaggggctcttgctgattatcctttccctggtggggggtgtgctgtcatgccacgaacagccacgatgtaacatcaccacaggcaatgagaggaacgactgctctgtagttatcaaatgcgagcaccattgtcctctcaacattacattcaaaaataagaccatgggaaatgtatgggtgggattctggcaaccaggagatgagcagaactacacggtcactgtccatggtagcaatggcaatcacactttcggtttcaaattcatttttgaagtcatgtgtgatatcacactacatgtggctagacttcatggcttgtggccccctaccaaggataacatggtgggtttttctttggcttttgtgatcatggcctgcttgatgtcaggtctgctggtaggggctctagtgtggtttctgaaacgcaagcccaggtatggaaatgaagagaaggaaaaattgctataaattctttttctttttcgcagaaccatgaatacagtgatccgtatcgtgctgctctctcttcttgtagcttttagtcaggcaggatttcatactatcaatgctacatggtgggctaatataactttagtgggacccccagacacaccagtcacttggtatgatactcaaggattgtggttttgcaatggcagtagagttaagaatcctcaaatcagacatacatgtaatgatcaaaaccttactttgatccatgtgaacaaaacttatgaaagaacatacatgggttataatagacaagggactaaaaaagaagactacaaagttgtagttataccacctcctcctgctactgtaaaaccacagccagagccagagtatgtgtttgtttatatgggagagaacaaaactctagaaggtcctccgggaactccagtcacatggtttaatcaggatggaaagaaattttgtgaaggagaaaaagttcttcatccagaatttaaccacacctgtgacaaacaaaaccttatactactgtttgtgaattttacacatgatggagcttaccttgggtacaatcatcaaggaacccagagaacacactatgaagttacagtattagatctttttccagattctggccaaatgaaaattgaaaatcatagtgaggaaacagagcaaaaaaatgatgaacatcataactggcagaaacagggtgggcaaaaacagggtgggcaaaaaacaaatcaaacaaaagttaatgacaggagaaaaacagcgcaaaaaagaccatcaaagctaaagccggcaactattgaggcaatgctggttacagtgactgccgggtctaacttaactttggttggacctaaagcagaaggaaaagttacttggtttgatggagatttaaaaagaccatgtgagcctaattacagactaagacacgaatgtaataatcaaaacttaactctgattaatgtaactaaagattatgagggaacttactatggtacaaatgacaaagatgagggcaaaaggtacagagtgaaagtaaatactacaaattctcaatctgtgaaaattcagccatataccagacaaactactcctgatcaagagcacaaatttgaattacagttcgaaactaatggaaattatgattcaaaaattccctcaaccactgtggcaatcgtggtgggtgtgattgcgggcttcataactctgatcattgtcttcatatgctacatctgctgccgcaagcgtcccagggcatacaatcatatggtagacccactactcagcttctcttactaagactcagtcactttcatttcagaaccatgaaggctttcacagcttgcgttctgattagcctagtcacacttagtgtagctattaaaaatcaatatcatgttcataatgttaccagagatggatatatcacattaaatgtaacaattgataatactacctggacaagatatcatttaaataagtggcatcaaatttgtacgtggtcagacccatcatacaaatgtcacagcaatggcagcattaccattcatgctttcaatattacttctggccagtacaaagctgaaagttttactaactggtttagatattacggtaatcataaacatgaaattcatatttttaacataactgtaattgagcatcctacaacaaaagcacccaccactgctaatacagctacatcaattaaatcaacaaccacacagcctactactagggagacaactcaacctaccaccacagtcagtacaactactgagaccactactcaaactacacagctagacacaacagtgcagaatagcactgtgttggttaggtatctgttgagggaggaaagtactactgaacagacagaggctacctcaagtgcctttagcagcactgcaaatttaacttcgcttgcttggactaatgaaaccggagtatcattgatgaatcatcagcctttctcaggtttggatattcaaattacttttctggttgtttgtgggatctttattcttgtggttcttctgtactttgtctgctgcaaagccagagagaaatctaggaggcccatctacaggccagtaatcggggaacctcagccactccaagtggaagggggtctaaggaatcttcttttctctttttcagtatggtgatcagccatgattcctaggttcttcctatttaacatcctcttctgtctcttcaacatctgcgctgcctttgcagccgtctcgcacgcctcgcccgactgtctcgggcccttcccaacctacctcctctttgccctgctcacctgcacctgcgtctgcagcattgtctgcctggtcatcaccttcctgcagcttatcgactggtgctgtgcgcgctacaattatctccatcacagtcccgaatacagggacaagaacgtagccagaatcttaaggctcatctgaccatgcagactctgctcatgctgctatccctcctatcccctgccctagccacttatgctgattactctaaatgcaaattcgcagacatatggaatttcttagattgctatcaggaaaaaattgatatgccctcctattacttggtgattgtgggaatagtcatggtctgctcctgcactttctttgccatcatgatttacccctgttttgatctcggctggaactctgttgaagcattcacatacacactagaaagcagttcactagcctccacgccaccacccacaccgcctcctcgcagaaatcagttccccctgatacagtacttagaagagccccctccccgacccccttccactgttagctactttcacataaccggcggcgatgactgaccaccacctggacctcgagatggacggccaggcctccgagcagcgcatcctgcaactgcgcgtccgtcagcagcaggagcgggccgccaaggagctccttgatgccatcaacatccaccagtgcaagaagggcatcttctgcctggtcaaacaggcaaagatcacctacgagctcgtgtccaacggcaaacagcatcgccttacctatgagatgccccagcagaagcagaagttcacctgcatggtgggcgtcaaccccatagtcatcacccagcagtcgggcgagaccaacggctgcatccactgctcctgcgaaagccccgagtgcatctactcccttctcaagaccctttgcggactccgcgacctcctccccatgaactga

SEQ ID NO: 119 - DNA, 1098 bp, Unknown
  Description of Unknown: Human adenovirus D37 sequence
atgtcaaagaggctccgggtggaagatgacttcaaccccgtctacccctatggctacgcgcggaatcagaatatccccttcctcactcccccctttgtctcctccgatggattcaaaaacttcccccctggggtactgtcactcaaactggctgatccaatcaccattaccaatggggatgtatccctcaaggtgggaggtggtctcactttgcaagatggaagcctaactgtaaaccctaaggctccactgcaagttaatactgataaaaaacttgagcttgcatatgataatccatttgaaagtagtgctaataaacttagtttaaaagtaggacatggattaaaagtattagatgaaaaaagtgctgcggggttaaaagatttaattggcaaacttgtggttttaacaggaaaaggaataggcactgaaaatttagaaaatacagatggtagcagcagaggaattggtataaatgtaagagcaagagaagggttgacatttgacaatgatggatacttggtagcatggaacccaaagtatgacacgcgcacactttggacaacaccagacacatctccaaactgcacaattgctcaagataaggactctaaactcactttggtacttacaaagtgtggaagtcaaatattagctaatgtgtctttgattgtggtcgcaggaaagtaccacatcataaataataagacaaatccaaaaataaaaagttttactattaaactgctatttaataagaacggagtgcttttagacaactcaaatcttggaaaagcttattggaactttagaagtggaaattccaatgtttcgacagcttatgaaaaagcaattggttttatgcctaatttggtagcgtatccaaaacccagtaattctaaaaaatatgcaagagacatagtttatggaactatatatcttggtggaaaacctgatcagccagcagtcattaaaactacctttaaccaagaaactggatgtgaatactctatcacatttaactttagttggtccaaaacctatgaaaatgttgaatttgaaaccacctcttttaccttctcctatattgcccaagaatga

SEQ ID NO: 120 - DNA, 429 bp, Unknown
  Description of Unknown: Human adenovirus D37 sequence
cctggggtactgtcactcaaactggctgatccaatcaccattaccaatggggatgtatccctcaaggtgggaggtggtctcactttgcaagatggaagcctaactgtaaaccctaaggctccactgcaagttaatactgataaaaaacttgagcttgcatatgataatccatttgaaagtagtgctaataaacttagtttaaaagtaggacatggattaaaagtattagatgaaaaaagtgctgcggggttaaaagatttaattggcaaacttgtggttttaacaggaaaaggaataggcactgaaaatttagaaaatacagatggtagcagcagaggaattggtataaatgtaagagcaagagaagggttgacatttgacaatgatggatacttggtagcatggaacccaaagtatgacacgcgcaca

SEQ ID NO: 121 - DNA, 540 bp, Unknown
  Description of Unknown: Human adenovirus D37 sequence
ctttggacaacaccagacacatctccaaactgcacaattgctcaagataaggactctaaactcactttggtacttacaaagtgtggaagtcaaatattagctaatgtgtctttgattgtggtcgcaggaaagtaccacatcataaataataagacaaatccaaaaataaaaagttttactattaaactgctatttaataagaacggagtgcttttagacaactcaaatcttggaaaagcttattggaactttagaagtggaaattccaatgtttcgacagcttatgaaaaagcaattggttttatgcctaatttggtagcgtatccaaaacccagtaattctaaaaaatatgcaagagacatagtttatggaactatatatcttggtggaaaacctgatcagccagcagtcattaaaactacctttaaccaagaaactggatgtgaatactctatcacatttaactttagttggtccaaaacctatgaaaatgttgaatttgaaaccacctcttttaccttctcctatattgcccaagaa

SEQ ID NO: 122 - DNA, 1560 bp, Unknown
  Description of Unknown: Human adenovirus D37 sequence
atgaggcgcgcggtggtgtcttcctctcctcctccctcgtacgagagcgtgatggcgcaggcgaccctggaggttccgtttgtgcctccgcggtatatggctcctacggagggcagaaacagcattcgttactcggagctggctccgctgtacgacaccactcgcgtgtatttggtggacaacaagtcggcggacatcgcttccctgaactaccaaaacgaccacagcaacttcctgaccacggtggtgcagaacaacgatttcacccctgccgaggccagcacgcagacgataaattttgacgagcggtcgcggtggggcggtgatctgaagaccattctgcacaccaacatgcctaatgtgaacgagtacatgttcaccagcaagtttaaggcgcgggtgatggtggctagaaaaaaggcggaaggggctgatgcaaatgataggagcaaggatatcttagagtatcagtggtttgagtttaccctgcccgagggcaacttttccgagaccatgaccatagacctaatgaacaacgccatcttggaaaactacttgcaagtggggcggcaaaatggcgtgctggagagtgatatcggagtcaagtttgacagcagaaatttcaagctgggctgggacccggtgaccaagctggtgatgccaggggtctacacctacgaggccttccacccggacgtggtgctgctgccgggctgcggggtggatttcaccgagagccgcctgagcaacctcctgggcattcgcaagaagcaaccttttcaagagggcttcagaatcatgtatgaggacctagtagggggcaacatccccgctctcctgaatgtcaaggagtatctgaaggataaggaagaagctggcaaagcagatgcaaatactattaaggctcagaatgatgccgtcccaagaggagataactatgcatcagcggcagaagccaaagcagcaggaaaagaaattgagttgaaggccattttgaaagatgattcagacagaagctacaatgtgatcgagggaaccacagacaccctgtaccgcagttggtacctgtcctatacctacggggatcccgagaagggggtgcagtcgtggacgctgctcaccaccccggacgtcacctgcggcgcggagcaagtctactggtcgctgccggacctcatgcaagaccccgtcaccttccgctctacccagcaagtcagcaactaccccgtggtcggcgccgagctcatgcccttccgcgccaagagcttttacaacgacctcgccgtctactcccagctcatccgcagctacacctccctcacccacgtcttcaaccgcttccccgacaaccagatcctttgccgcccgcccgcgcccaccatcaccaccgtcagtgaaaacgtgcctgctctcacagatcacgggacgctaccgctgcgcagcagtatccgcggagtccagcgagtgaccgtcactgacgcccgtcgccgcacctgtccctacgtctacaaggccctgggcatagtcgcgccgcgcgtgctttccagtcgcaccttctaa

SEQ ID NO: 123 - DNA, 2850 bp, Unknown
  Description of Unknown: Human adenovirus D37 sequence
atgtgccttaccgccagagaacgcgcgaagatggccaccccctcgatgatgccgcagtgggcgtacatgcacatcgccgggcaggacgcctcggagtacctgagcccgggtctggtgcagtttgcccgcgccaccgacacgtacttcagcctgggcaacaagtttaggaaccccacggtggctcccacccacgatgtgaccacggaccggtcccagcgtctgacgctgcgctttgtgcccgtggatcgcgaggacaccacgtactcgtacaaggcgcgcttcactctggccgtgggcgacaaccgggtgctagacatggccagcacttactttgacatccgcggcgtcctggaccgcggcccaagcttcaaaccctactcgggcacggcttacaacagcctggcccccaagggcgcccccaatcccagtcagtggactaccaaagaaaagcaaaacggaggaactggagcagaaaaagatgttacaaagacatttggacttgccgccatgggaggcagtaatatttctaaagacggtttgcagattggaactgacaaaacagcaaatgctgaaaaaccaatctatgcagacaaaactttccagccagaacctcaagttggagaagaaaactggcaggataatgatgaatattatggcggcagggctcttaaaaaagataccaaaatgaagccatgctatggttcatttgctaaacccacaaacaaggaaggtgggcaggctaaattgaaagaaacacccaatggtaccgatcctcaatacgatgtggacatggctttctttgactcaagcactataaatataccagatgtggtgttgtacactgaaaatgtagatttggaaactccagatacacatgtggtgtacaaaccaggcaaagaggatgacagttctgaagctaatttaactcagcagtccatgcctaacagaccaaactacattggcttcagagacaactttgtggggctattgtactacaacagcactggcaacatgggtgtgctggctggtcaggcttctcagttgaatgccgtggtcgacttgcaagacagaaacaccgaactgtcttaccagctcttgctagattctcttggtgacagaaccagatattttagtatgtggaactctgcggtggacagctatgatcccgatgtcaggatcattgagaaccacggtgtggaagatgaacttcctaactattgcttccccttggacggtgttcaaactaattcagcctatcaaggtgttaaactaaagcctgatcaaacaggaggcggagttaatggagattgggtaaaggatgatgacatttcagcccataatcaaattggaaagggcaacatctttgccatggagatcaacctccaggccaacctgtggaagagttttctgtactcgaacgtggccctgtacctgcccgactcctacaagtacacgccggccaacgtcacgctgcccgccaacaccaacacctatgagtacatgaacggccgcgtggtagccccctcgctggtggacgcctacattaacatcggcgcccgctggtcgctggaccccatggacaacgtcaacccctttaaccaccaccgcaatgcgggcctgcgctaccgctccatgcttttgggcaatggccgctacgtgcccttccacatccaagtgccccaaaagttctttgccatcaagaacctgctcctgctccccggctcctacacctacgagtggaacttccgcaaggatgtcaacatgatcctgcagagttccctcggaaacgacctgcgcgtcgacggcgcctccgtccgcttcgacagcgtcaacctctacgccaccttcttccccatggcgcacaacaccgcctccaccctggaagccatgctgcgcaacgacaccaacgaccagtccttcaacgactacctctcggccgccaacatgctctaccccatcccggccaaggccaccaacgtgcccatttccatcccctcgcgcaactgggccgccttccgcggctggagtttcacccggctcaagaccaaggaaactccctcccttggctcgggttttgacccctactttgtctactcgggctccatcccctacctcgacgggaccttctacctcaaccacaccttcaagaaggtttccatcatgttcgactcctcggtcagctggcccggcaacgaccggctgcttacgccgaacgagttcgagatcaagcgcagcgtcgacggggagggctacaacgtggcccaatgcaacatgaccaaggactggttcctcgtccagatgctctcccactacaacatcggctaccagggcttccatgtgcccgagggctacaaggaccgcatgtactccttcttccgcaacttccagcccatgagcaggcaggtggtcgatgagatcaactacaaggactacaaggcagtcaccctgcccttccagcacaacaactctggcttcaccggctacctggcacccaccatgcgtcaggggcagccctaccccgccaacttcccctacccgctcatcggctccaccgcagtgccatccgtcacccagaaaaagttcctctgcgacagggtcatgtggcgcatccccttctccagcaacttcatgtccatgggcgccctcaccgacctgggtcagaacatgctctacgccaactcggcccacgcgctcgacatgaccttcgaggtggaccccatggatgagcccaccctcctctatcttctcttcgaagttttcgacgtggtcagagtgcaccagccgcaccgcggcgtcatcgaggccgtctacctgcgcacgcccttctccgccggcaacgccaccacctaa

SEQ ID NO: 124 - protein, 361 aa, Unknown
  Description of Unknown: Human adenovirus D37 sequence
MSKRLRVEDDFNPVYPYGYARNQNIPFLTPPFVSSDGFKNFPPGVLSLKLADPITITNGDVSLKVGGGLTLQDGSLTVNPKAPLQVNTDKKLELAYDNPFESSANKLSLKVGHGLKVLDEKSAAGLKDLIGKLVVLTGKGIGTENLENTDGSSRGIGINVRAREGLTFDNDGYLVAWNPKYDTRTLWTTPDTSPNCTIAQDKDSKLTLVLTKCGSQILANVSLIVVAGKYHIINNKTNPKIKSFTIKLLFNKNGVLLDNSNLGKAYWNFRSGNSNVSTAYEKAIGFMPNLVAYPKPSNSKKYARDIVYGTIYLGGKPDQPAVIKTTFNQETGCEYSITFNFSWSKTYENVEFETTSFTFSY

SEQ ID NO: 125 - protein, 143 aa, Unknown
  Description of Unknown: Human adenovirus D37 sequence
PGVLSLKLADPITITNGDVSLKVGGGLTLQDGSLTVNPKAPLQVNTDKKLELAYDNPFESSANKLSLKVGHGLKVLDEKSAAGLKDLIGKLVVLTGKGIGTENLENTDGSSRGIGINVRAREGLTFDNDGYLVAWNPKYDTRT

SEQ ID NO: 126 - protein, 176 aa, Unknown
  Description of Unknown: Human adenovirus D37 sequence
LWTTPDTSPNCTIAQDKDSKLTLVLTKCGSQILANVSLIVVAGKYHIINNKTNPKIKSFTIKLLFNKNGVLLDNSNLGKAYWNFRSGNSNVSTAYEKAIGFMPNLVAYPKPSNSKKYARDIVYGTIYLGGKPDQPAVIKTTFNQETGCEYSITFNFSWSKTYENVEFETTSFTFSY

SEQ ID NO: 127 - protein, 519 aa, Unknown
  Description of Unknown: Human adenovirus D37 sequence
MRRAVVSSSPPPSYESVMAQATLEVPFVPPRYMAPTEGRNSIRYSELAPLYDTTRVYLVDNKSADIASLNYQNDHSNFLTTVVQNNDFTPAEASTQTINFDERSRWGGDLKTILHTNMPNVNEYMFTSKFKARVMVARKKAEGADANDRSKDILEYQWFEFTLPEGNFSETMTIDLMNNAILENYLQVGRQNGVLESDIGVKFDSRNFKLGWDPVTKLVMPGVYTYEAFHPDVVLLPGCGVDFTESRLSNLLGIRKKQPFQEGFRIMYEDLVGGNIPALLNVKEYLKDKEEAGKADANTIKAQNDAVPRGDNYASAAEAKAAGKEIELKAILKDDSDRSYNVIEGTTDTLYRSWYLSYTYGDPEKGVQSWTLLTTPDVTCGAEQVYWSLPDLMQDPVTFRSTQQVSNYPVVGAELMPFRAKSFYNDLAVYSQLIRSYTSLTHVFNRFPDNQILCRPPAPTITTVSENVPALTDHGTLPLRSSIRGVQRVTVTDARRRTCPYVYKALGIVAPRVLSSRTF

SEQ ID NO: 128 - protein, 949 aa, Unknown
  Description of Unknown: Human adenovirus D37 sequence
MCLTARERAKMATPSMMPQWAYMHIAGQDASEYLSPGLVQFARATDTYFSLGNKFRNPTVAPTHDVTTDRSQRLTLRFVPVDREDTTYSYKARFTLAVGDNRVLDMASTYFDIRGVLDRGPSFKPYSGTAYNSLAPKGAPNPSQWTTKEKQNGGTGAEKDVTKTFGLAAMGGSNISKDGLQIGTDKTANAEKPIYADKTFQPEPQVGEENWQDNDEYYGGRALKKDTKMKPCYGSFAKPTNKEGGQAKLKETPNGTDPQYDVDMAFFDSSTINIPDVVLYTENVDLETPDTHVVYKPGKEDDSSEANLTQQSMPNRPNYIGFRDNFVGLLYYNSTGNMGVLAGQASQLNAVVDLQDRNTELSYQLLLDSLGDRTRYFSMWNSAVDSYDPDVRIIENHGVEDELPNYCFPLDGVQTNSAYQGVKLKPDQTGGGVNGDWVKDDDISAHNQIGKGNIFAMEINLQANLWKSFLYSNVALYLPDSYKYTPANVTLPANTNTYEYMNGRVVAPSLVDAYINIGARWSLDPMDNVNPFNHHRNAGLRYRSMLLGNGRYVPFHIQVPQKFFAIKNLLLLPGSYTYEWNFRKDVNMILQSSLGNDLRVDGASVRFDSVNLYATFFPMAHNTASTLEAMLRNDTNDQSFNDYLSAANMLYPIPAKATNVPISIPSRNWAAFRGWSFTRLKTKETPSLGSGFDPYFVYSGSIPYLDGTFYLNHTFKKVSIMFDSSVSWPGNDRLLTPNEFEIKRSVDGEGYNVAQCNMTKDWFLVQMLSHYNIGYQGFHVPEGYKDRMYSFFRNFQPMSRQVVDEINYKDYKAVTLPFQHNNSGFTGYLAPTMRQGQPYPANFPYPLIGSTAVPSVTQKKFLCDRVMWRIPFSSNFMSMGALTDLGQNMLYANSAHALDMTFEVDPMDEPTLLYLLFEVFDVVRVHQPHRGVIEAVYLRTPFSAGNATT

SEQ ID NO: 129 - DNA, 114 bp, Unknown
  Description of Unknown: Human adenovirus 50 sequence
caatcaatataatataccttatagatggaatggtgccaatatgtaaatgaggtaatttaaaaaagtgcgcgctgtgtggtgattggctgcggggtgaacggctaaaaggggcgg

SEQ ID NO: 130 - DNA, 114 bp, Unknown
  Description of Unknown: Human adenovirus 50 sequence
ccgccccttttagccgttcaccccgcagccaatcaccacacagcgcgcacttttttaaattacctcatttacatattggcaccattccatctataaggtatattatattgattg

SEQ ID NO: 131 - DNA, 365 bp, Unknown
  Description of Unknown: Human adenovirus 50 sequence
acatgctgggaggtgacgtgacttatgggggaggagttatgttgcaagttatcgcggtaaaggtgacgtaaaacgaggtgtggtttggacacggaagtagacagttttcccacgcttactgacaggatatgaggtagttttgggcggatgcaagtgaaaattctccattttcgcgcgaaaactgaatgaggaagtgaatttctgagtcatttcgcggttatgacagggtggagtatttgccgagggccgagtagactttgaccgtttacgtggaggtttcgattaccgtgtttttcacctaaatttccgcgtacggtgtcaaagtcctgtgtttttacgtaggtgtcagctgatcgctagggtat

SEQ ID NO: 132 - DNA, 3431 bp, Unknown
  Description of Unknown: Human adenovirus 50 sequence
ttaaacctgtcgagttccgtcaagaggccactcttgagtgccagcgagaagagttttctcctccgcgccgcgagtcagttttgcgctttgaaaatgagacacctgcgattcctgccacaggagattatctccagcgagaccgggatagaaatactggagtttgtggtaaataccctgatgggagatgacccggaaccgccagcgcagcctttcgatccacctacgctgcacgatctgtatgatttagaggtagacgggccggacgatcccaatgaggaagctgtaaatgggttttttactgattctatgctactagctgccgatgaaggattggacataaaccctcctcctgagacccttgataccccaggggtggttgtggaaagcggcagaggtgggataaaattgcctgatctgggagcagctgaaatggacttgcgttgttatgaagagggttttcctccgagtgatgatgaagatggggaaactgaacagtccatccataccgcagtgaatgagggagtaaaagctgccagcgatgtttttaagttggactgtccggagctgcctggacatggctgtaagtcttgtgaatttcacaggaataacactggaatgaaagaactattgtgctcgctttgctatatgagaatgcactgccattttatttacagtaagtgtatttaagtgaaatttaaaggaatagtgtagctgtttaataactgttgaatggtagatttatgtttttacttgtgattttttgtaggtcctgtgtctgatgatgagtcgccttctcctgattcaactacctcacctcctgaaattcaggcgcccgtacctgcaaacgtatgcaagcccattcctgtgaagcctaagtctgggaaacgccctgctgtggataagcttgaggacttgttggagggtggggatggacctttggaccttagtacccggaaactgccaaggcaatgagtgccctgcagctgtgtttatttaatgtgacgtcatgtaataaaattatgtcagctgctgagtgttttattgcttcttgggtggggacttggatatataagtaggagcagatctgtgtggttagcttatagcaacctgctgccatccatggaggtttgggctatcttggaagacctgagacagactaggctactgctagaaaacgcctcggacggagtctctggcttttggagattctggttcggtggtgatctagctaggctagtgtttaggataaaacaggactacagggaagaatttgaaaagttattggacgacagtccaggactttttgaagctcttaacttgggccatcaggctcattttaaggagaaggttttatcagttttagatttttctactcctggtagaactgctgctgctgtagcttttcttacttttatattggataaatggatccgacaaacccacttcagcaagggatacgttttggatttcatagcagcagctttgtggagaacatggaaggctcgcagcatgaggacaatcttagattactggccagtgcagcctctgggagtagcagggatactgagacacccaccgaccatgccagcggttctggaggaggagcagcaggaggacaatccgagagccggcctggaccctccggtggaggagtagctgacctgtttcctgaactgcgacgggtgcttactaggtctacgtccagtggacaggacaggggcattaagagggaaaggaatcctagtgggaataattcaagaaccgagttggctttaagtttaatgagccgtaggcgtcctgaaactgtttggtggcatgaggttcagagcgaaggcagggatgaagtttcaatattgcaggagaaatattcactagaacaacttaagacctgttggttggaacctgaggatgattgggaggtggccattaggaattatgctaagatatctctgaggcctgataaacagtatagaattactaaaaagattaatattagaaatgcatgctacatatcagggaatggggcagaggttataatagatacccaagataaagcagcttttagatgttgtatgatgggtatgtggccaggggttgtcggcatggaagcagtaacatttatgaatattaggtttaaaggggatgggtataatggcattgtatttatggctaacactaagctgattctacatggttgtagcttttttgggtttaataatacttgtgtagaagcttgggggcaagttggtgtgaggggttgtagtttttatgcatgctggattgcaacatcaggtagggtcaagagtcagttgtctgtgaagaaatgcatgtttgagagatgtaatcttggcatactgaatgaaggtgaagcaagggtccgccactgcgcagctacagaaactggctgcttcattctaataaagggaaatgccagtgtgaagcataatatgatctgtggacattcgaatgagaggccttatcagatgctgacttgcgctggtggacattgcaatattcttgctaccgtgcatatcgtttcccatgcacgcaagaaatggcctgtatttgaacataatgtgattaccaagtgcaccatgcacataggtggtcgcaggggaatgtttatgccttaccagtgtaacatgaatcatgtgaaggtgatgttggaaccagatgccttttccagagtgagcttaacaggaatctttgatatgaatattcaactatggaagatactgagatatgatgacactaaaccgagggtgcgcgcatgcgaatgcggaggcaagcatgctagattccagccggtgtgcgtggatgtgactgaagacctgagacccgatcatttggtgcttgcctgcactggagcggagttcggttctagtggtgaagaaactgactaaagtgagtagtggggcaagatgtggatggagactttcaggttggtaaggtggacagattgggtaaattttgttaatttctgtcttgcagctgccatgagtggaagcgcttcttttgaggggggagtatttagcccttatctgacgggcaggctcccatcatgggcaggagttcgtcagaatgtcatgggatccactgtggatgggagacccgtccagcccgccaattcctcaacgctgacctatgccactttgagttcgtcaccattggatgcagctgcagccgccgccgctactgctgccgccaacaccatccttggaatgggctattacggaagcatcgttgccaattccagttcctctaataacccttcaaccctggctgaggacaagctacttgttctcttggctcagctcgaggccttaacccaacgcttaggcgaactgtctaagcaggtggcccagttgcgtgagcaaactgagtctgctgttgccacagcaaagtctaaataaagatctcaaatcaataaa

SEQ ID NO: 133 - DNA, 19668 bp, Unknown
  Description of Unknown: Human adenovirus 50 sequence
atggccagccgcggaggaaatcagtcaagcgaccgccaacgggagcacacccccgaacgcggaatgggctctgccagccatccgcctccaaggccggaccgcagcccatctcagtcgcctccacctctgcccccgaagaggaacacctaccgtcgcgtggggtccgattcttctatcgagagccaggtggtactggtaagcgaaacttcgcggtcatccctgtctccggaacggagcaacagtcctcccccgatccctcccaagaagaagcccaggaagaccaagcatgtccctctgcaagacatcagccaggacagcgaagaagaaagagaacaggctcagttggtggccgtgggcttcagctaccccccggtgcgcatcattgagaaggatggcaagagaagtgttgagaagatcgacaagaatgaccctatagctaaaggagctacttctattgctgttaggaatcctttgagcttgcccctggtatctgcctgggagaagggcatggaagtgatggctgtgctaatggagaggtataggctggataatgacctgagaacctctttcaagctgatgccagagcagcacgagcagtacaagcgtatctgccaccagtatgtgaacgaggagcaccgtggcatcccgctgacatttagtagcatgaagaccctgacagcgatgatgggaagattcatgcagggattggtgcattcttattctgagatcgcccacaataattgggagtgcaccgggtgcgctctgtgggctcatggatgcaccgattacgaaggcaaggtgaaatgcctgcatggcactatcatgatccagaaggaccacattatcgagatggatgtggcgagcgaaaacgggcagcgcgctatgaaggagaacccagacagagccaagatcacccagaaccgctggggcagaaatgtggtccagttggccaacaacgatgcccgctgctgtgtgaatgatgccaactgtgctactaaccaattttccagcaagtcctgtgggatgttttacaccgagggaagtaaggctcaggaagctttcaagcagtacgaagccttcatgaaggccgtgtacccagggataacccccgaccaagccaggatgatgctgatccccattcattgcgattgcaaccacaagccaggctgcgctcccgtgatgggcaggcagacctgtaagatgaccccctttggaatggccaatgctgaagacttggatgtgactaccatcagtgacccgaccgtgctggcaagcgtgagacacccagccttgatggtgttccagtgttgcaacccagtgtaccgcaactcccgtgtccagaatgccggccccaactgtgatttcaagatctctgctcctgacctgcttggcgccctgcaactgaccagaaagttgtggcaagacacctttcccgaaattccagttcccaagctggtgatccccgagttcaagtggcagaacaggttacagttccgcaacgtctccctgcccacgggtcactctgactcccgccagaacccatttgatttctgagtgaatgatgaaaacgaatgagcaaaaaaccagagccttagtgcatgtaaaaataaaatgctttttattgaacacggttttacatgacttattgcatatccatacggtcaaacgcggtggccctttcaatgcgtgcgcggtgagaacgaaagtaagatgagtgggtgtttaggaagcgatatagcgcctcctggttgcggcgcagggtgggctggacttggggtgattggagcatgctgtttgacaccccagtcagcaacttcatggtggggtttccgttcatggggcggtcgggccagtgcacaaaggcatgaaggaacatacagcaaaaaagtccacaggcggctgagcgcgggccctgcacgctctgggtggacttttccagggtgatgcagcggtctttggtagcaagggcactgcggcgcaggagcccctcgtactcaaactggtaaatctgtttgagtcgctcatccgagaacccaaaaggatcaaaaaggtagcaggtgttggagcgcgggttccaaccaaaagccagccagtgctctccccccgtctcgcgtccggcagtgttgactatggcgcaggcgagcttgtcgggggccatgaaccccgggaaacgcttgtcaaaggttcccaggaaatagggtccgcagcccaggtctcggacgatggctttgagctcttgctcgctggagccgtttccggacccgcatgacatggctgcagctgctgcttgcaagaagcaagaggcttcttatgtggtggcgttgccggccgagaacggtgtgcgcaggtagacggcctcgatgacgccgcggtgtggctggtgcactctgaccacgtcgaagacttcgaaaagaagataaagcagggtgggctcatccatgggatccacctcaaaagtcatgtccagcgcatgggccgagttggcatacagcaagttctgtcccaggtctgtaagggcacccatggacatgaagttgctagagaatgggatgcgccacatggtcctgtcgcacaggaattttttctgggtgacactggttactgcagtggttccaattagggggtatgggtagttagcagggtacgcttgaccctgacgcatggtaggagccatgtaacccacaaagccagagttattatgctggtagggtacggcgacagctttatagtctttgtagttaatctcatcaaccacctgtctactcatgggctggaagtttctgaagaaggagtacatgcgatccttgtaaccctcaggaacgtagaagccctggtatccaatgttgtagttggcaagcatctggaccaggaaccagtctttggtcatgttacattgggccacattgtagccttccccatcaactgtgcgcttgatttcgaactcatttggacttagcaatctgtcattaccaggccagctcactgaagagtcaaacatgatggagactttcttgaaagtgtggttaaggtagaaggtaccatccaggtagggtatagaaccagagtaaacaaagtagggatcgaaccctgatcccaaagagggagtctccttggttttgagtctggtgaaggaccagcctctgaaggcggcccagttgcgagagggaatggagatgggaacgttggtagcgttggccgggatggggtagagcatgttggcagcagaaaggtagtcattgaatgattgatcattggtgtcattgcgcagcatggcttcaagggtggaggcagtgttgtgggccatggggaagaaggtggcatagagattgatgctggtaaaacttatgctggcaccatcgacccggagatcattaccaagggaactctgcaggaccatgttcacatcctttctgaagttccactcgtaggtgtaagaaccgggtagaagcagcaggttcttcacagcaaagaatttctgaggcacttgaatgtggaaaggcacgtaacgaccattgcccaaaagcatggaccggtatcgcaggccagcgttgcggtgatggttaaaggggttgacattgtccatggcatccaaagaccatctggcgccaatgtttacgtaggtatccaccagggatgggggaaccacccgcccattcatgtagtcataagtgttggtgttagttggaagagtgacattggctggggtgtatttgtaggagtctgggagatacagagccacattggaataaagaaaacttctccagagattagcttggaggttaatttccatggcaaacggatttcccttagcaatttcacttatgccctttggctctaaatctttccaagtagtggtttcatcaccatttgtctcaattcccttgtaactgtctattcgcggacctacaccatccaatggaaaacaatagttaggaagttcatcttccacaccatggttctcaataacacgcacatctgggtcatagctatccactgcttgattccacatactgaaatatctggttctgtcccccagagaatcaagcaagagttgatatgacaattctgtgtttctgtcttgcaagtcaaccactgcatttagctgagacgcttgtccagccagcactcccatgttgccagtactgttgtagtacatgagtccgatgaagttgtccctgaagccaatatagttaggtctattgggcatggactgttgaccaaggtttgcatgagagctagcatctgaagctccaggtttgtacaccacatgagtgtcaggagtttctagatccacattttctgcatacattacaattttaggcttgaggccagtcatttgtgatcttaggtcgaaaaagttcatgtcaatgtcatattcaaccttgccttcttcttctttcttcacttttgcctgcccgcctttaacattagtaggtttagcgaaagacccgtagcagggtttcattttagtttcaggtttaagtgctctgcctccatatttttcatctgtgccatccgtatcagtccaagattcctctcccacctgaggttctggctgatacagtttatcagcataaatgggtttagggccaccttcagatggaacttccaaacctattggcagtccttcttttgtaatttcagcttcggcttttactggcgcattgccaaaagtgtatgtagcttgttggtcgtcttccccatcctcttcatctcccttattaagccactgagatgtattgggagcgcccttaggggccaatgagttgtaagcagtgccagaatatggcttgaagctaggacctctatccaacacaccccgaatgtcaaagaaagtgctggccatatccagcactctgttgtcgcccacagccaaggtgtatcgaactttgtatgcgtaggtattgtcttcccggtcaacgggcacaaagcgcagcatcagccgctgactgcggtcggtggtcacatcatgggtgggcgccacggtggggttcctaaacttgttccccagattgaagtaggtgtctgtggcgcgggcgaactgcaccagacccggactcaggtactccgaagcatcctgtccggcgatgtgcatgtatgcccactggggcagcatcgatggggtggccatcttgaaatcaactcagcctcggcgcgcgacctcttccttgctcctctgctgttgctgcggcggcggcgtgatgatgacacatacacacagacaggcaagttaagcgctactccatatttaatttaaaagcagcgacggcgctttacactttgcacgcccagacccacgatgctgttcagagtactctgccagtttgcattcggacgtggagtgcccccaggacgcggtctggctacggcgacgggctgtacggtggtgggcttcggggtagcgacaggcttgcgagcaggcgctgcaacagcagggggaggcaagtccaaggtagcgggtcggtgtgactgagaaggtttcattaccccggtagccatgggggctacaggtctggtggtgggcattccaagcttcactgcctcctcgtaggagggcgggtcgtctgagcgtgtgactagtgtctcctccagatcggggcgcggacgcttgtcgccccgcttttcaaggggagggagatcttcctccacttccatttcaccaggggctgacggcggcgggtcaaggcggctgtttatctgtttctgcacggcctggttggccagatccaccaccccattgataccagaggcgattccatcaaccaccttctgttggaagttttgctctttaagcttatttttcaatgcctgccctgtgctgctgttccaagctttgttcccataggtttttatggtagagccaaaatttttaagcccgctccagatactgctccaattgaaggcgcccccgttcagttggctggtgccgatgtcgctccaggtgcccatgtacggcctcgtgccgtgtcgcggagccagggatgaaaaattgatgtcttccatctctacaaaaacatagtcacaggaccaggagcatcagagtccattctgttttatttataagtttttccaatgtcagtggcgctgcgaggcctgaaccgccacggaagctatgcctggtatcgccccgatcgccgcggctatgatggggatcagagcaggcagaaagccaccccccagcctcttgctgatagcgcgccgccgcctgtggcgtcgcattccgcgccccaacatccctcttctacggcgcgagtttcttcctcggtagccagtaatggggacacgaaggcggcaagtgagggccatatctgcaaggaggcagcggcaacagttgttaagttgtgatgcttggatggtagcgtacgcgcggtaacgtcaggggatccgcgcggccatcgcgatacactctccgcaccagagcagcgggagtcagattgctggtggggcggcggcgacgacgatgactacgacttgcaggtgttttgcggcgacggcgggaagtgctgctcctgctgcggtagtagcgagtgcctcggtaacccggagttggaataatggatgggtgcagagcataatttggcatcagcaaacttgctggaccgtactttcgccgggatcttcgagtggtgttgacagcagctggagttgtaacgggtgcggtcatccagggatccgtttgcacctcaatggaggtggttgtgggctttgcaggttcggtttggacttccattgactcggtgggaatcttgatgtctacggtttgtactcccaaacctggcgccacctgcttgatgggtctcactttgacctcaggttgtatatcgggatccactttcattttctccagcacgtcctccagccgctggcgcttgggcaccatcaattgcatagtgggatacagatcctcaccctctcgcttgttgcctctgcgtggaggcacgggcagcacttgctgcagggtgactggcttgagactaggggtgggattcccattgtccaagggaatggacaccgcctcctccttggggctcgagcgggagcgcttgccataagcaaactcgcccaggcggtcggccgcctgctccagaatatcatcatccccatacacctcatcataggaccgcttaaaagcagtgctggagcgctcgccgggcgtaaagaccaccgtggttccaggtctcagcacaggctgcactttgcgtccacgccactgcactcgccgccttggggcgaactcgcgtacaaactccgccagaccatcattgccatcttcttcctttttgtcctttttgacccgcttgattttgcggggctttttttcatccttcaccggcggaccgtagatttcaggcgcgatgacctggagcatctcttccttgtatttgcgcttggacatcctcgctgggacacaacatcggagactgctcagtatcttctaagagcgaggggggcgggtgcgcacgggcacgcgctggccggtggtggcgtcgcgcacccagtacacattgcctcttcgcggttgggccatgttggcaatggccgctgctgccgccgtggctgcgcgcctgcgggacctgccggcactggcacctgaagccgcgcgtctggccgctctaagcatagctcttcgccccacgcgtttggccctcctcagcagagctcttgccgctcgcatagcgggagtagcccggtggcgcctggcgatgcgtctccgcctgctcttccggcgagcataggcgcgggcgtcagccactacgctgtcaataactgcatccacagtagatgtaggtgcagtaggagtataattacgagcatcggccaccacctggtcgatcacatcatcgacggtggttctagtgcgggtacgacccttgagggcgccccatggagcgcggaagtgcccgcgcacgcgcacagggtgctgtgtagagcgtttgcgagcacctccgtacatcttgcttggcgcgcgcaggccccaaccggtgttattactaggtgagataagaatggacatttttttttagaaagtgcggcttgaaaggacgcgcggcgcgactatgcccagggccttgtagacgtaggggcaggtgcggcgtctggcgtcagtaacggtcacgcgctggactccccggatactgctgcgcaacggcagggtcccgtgatctgtgagagcaggaacgttttcactgacggtggtaatggtgggcgctggcgggcggatgaggatctggttctcagggaagcggttgaagacgtgcgtgagcgaggtggactggcgaagctgctgggagtacacggcttgctcgttgtagaaactctttgagaagaccggcatgagctctgcacctaccactggatagttgctgacttgtctcgtggaacggaatgtgacagggtcctgcatcatgtctgggagcgaccagtacacctgctctgctccacaggtgacatccgaggtggtgagcagtgtccaggaacggactcctttttcagggtcaccatagttgtaggacaggtaccagctgcggtaggctgtattcactttatcttccaagacattgtaacttctactcttgctgtctttttctacaggtttaatagtgagtttggtctctgtagtttcggccacagcagccaatagcgattcttcagttgcaacagatgaagctgtatagttgtctcctctgacttcttcggcattagccacccttacagggtcgctgacaactatgttggctttagcaatagcagcagctttagcggcttctgttttggcttctcgttctttcttactgttcttataggcttctacatccaacagggccgggatattacccccttcaagatcctcatacaagatcttaaaaccctcctggaatgggtgtcttttcctgataccaagcaagttactaaggcgactttcagtaaagtcaactccgcaaccaggcaacaatacaatgtcaggatggaatgcctcataggtgtaaaccccaggcataatcaacttagtttccggatcccaacccagtctaaagttcctggtgtcaaatttaacaccaatgtcactctccaacactccattctgtctgcccacttcaaggtaattatcaatgatggcattgttcattaggtcaatggtcattgtggctgagaagttcccttccggtagagtaaactcaaaccactcatattccaaaatatcctgcttgtgatcataattgtcatctactgtgacaccttcaggagcctttctagacaccatcacccgagctttgaacttgttgctaaacatgtactcgttcacgttgggcatgttggtgtgcatgatagtcttcagctgaccgccccatcgcgaccgctcgtcaaagttgatggtctgggtgctggcctccgtgggggtaaagtcattgttttgcaccaccgtggtgaggaagttgctgtggtcgttctgatagttcagtgaggcgatgtccgcggacttgttgtccaccaaatacaaccgggtggtatcatacaatggtgccagctccgagtaacgaatgctgtttctcccctccgtaggtgccaggtaccgagggggtacaaagggagcctccagtggtggctgcatcgccgccgccgccgcctgctgcatcacgctctcgtacgaaggaggaggaccctccggatacaccaccgctccgcctagcacggttcgcctcatcatactagctataacagagaagaaacgaacgcacgctggtcgccatggccttggtgagtatttattttcggtttcttacatcaggcgcccgacgcgggggcgcaggtgagcgaacgggttaccaccactcccacccaagtccaacacgctgctgtcgtcggcggaatcatcatcggcccacaccaggccccgctgcctgtcgtgccactggcgtttacgggtagcgatgccccggctatcccccagcgcccggggatcgtccctgtgatcgtgcgcgtacgtcttccagcggttcattttgtcaaccaagctttctatcccgttgttggggaaattcttctccctctcgggtctcaacagggagtcgttcaaatactcctcctcgccgatcaagcgaggacgggttattcttcccagctcactgctgcgtacactgtttagcgaaaatggcaaactagggaaaggacttgcggcctcgggagccgctgcagcacccgttgctccggacagtgacacggaagagtgccttctatcgccaccttccttcttccaagtgttataaccaggaggcggggagaaaacactactgtccacatcgtcccataaaaacccgtcattggggtcgggcatgtcatactcgcccgtatagaacccaggtgggggcagccaatgggggttcaggatagcattggtgaaataatcagagttcatagcagccgccctgtgtaagtagtctagcagtttattgataaaaggccggttactggcatacatgctgggctccatgtttcgggctgtcatatcgagcgcagcagtaggagtcgccccctcctgcattaggaacagtcccacgctctgctgcacgtatctcaggatccgttcctcctccgcggtaagcgaatactgaggagggatcttctgcgaccggttggtcagcaagaagtttaaggtggcttccaagctgccagtgtcctcccgacccagagcgcggctcacttgggtaatttcttgataggtttgctcatctacctgagtttgccctatggcctcgcgatacaggttcaacagatagcccaagtacgaattacggtcgatgctaccgctgtcagtgaatggggctaccaagagcagtagtaggcgggagttgggggtcagcaagctagacacggtcgcccgatctcccactggggcgcgcactccccacagaccattcaggttcttaaaagcctggctcaggttcactgtctgcaagccctgtctgctggtctggaaaaagtagtctggcccggactggtacacttcgctttgagggacttcggccaccatgagtctcaatgcacttagaaagtttgtgtagtcttgctgaccgcgaggcacgttggcaggctgagtgctgaggaaggcgttcaaagccaccagcgaccctaaattggcgtctcgctggaaccgctcgcgctgagacacggcctcgcgcacatcggtcaccatccggtccaggttggtctgcacgttgctgctgttgtaacgggctacgcgctccaatagggcattgtataccagcccagcctcatcgggacgtatggctttgttctccaccagcgcgttcacgatggccaggaccttctcgtgtgtggggttggagcgggagggcactacggcctccaggatggcagaaaggcggttggcctggggttgctgtctaaaggcttcggggttgcgggtcgtcagcgccatgatgcgttgcatggcctggctccaatcgtccgaggagttaatgccggacggctggctctgtagcgccgcccgttttgcggggtccggtgcctgctgttccatctagcaaaaatatggatggtcgcgccatcagtcttccagatactcgccctcctcatcctggccttcatccacctcttctatgtaaggaagctcataccctgctgcgtccagggccctgcgactgggctgccactgcaagtccgctcccatgtcaaagtagttttccccctcggttccagccccagtcagagctctttgcaagctgtgcataagttctctgtcgctcagctcacgccttctgctggcgctcactgcgcggtgcatcctgtcgttgcggtacactcccagatcgtcactcaaggtcagcaccttgagagtcatgcgcatataaaacccatctatcttcacctccttgtctataggtacgtatggggttttgtagatcttgcgagcgtagtgcttgcccaggctcaagaccgagtagttaatagcagccaccttctcagctagacccaggctacgttcttgcacgattatactttgcagaatattgataagatcatacaaccatctcccctcgggctcagtaatgttcaacagcgcctccctaaatgcctcattgtctctactatgttgcaccaccagaaacagctgagcggttagaggtttgctggtggggttctgggtaatggcttccatcaggtcccacaggtgcatcagacccagtgtcacttcctcgcgggcaatcagggtgcgcacatggttgttgaaagatttttgaaagttgcgctcctccttcacggtctgctcgtaagctgatactaggttggccgcggccacatgtgccctagcaggacttattcctgtcacttcatcgacttcaaaatcatcatcacgcagcacccgtcttcggtccagaccgtgacgcagttcgcgacccgcgttaaagcgggaagctcgcatttcctcaggctcctcgccgctcctgtccctgaacaggttctgctggggcacgtacgcctcgcgagagtcctttttcagttgcacccgcgggtgccgctcgggcgatggtgcgcccaggcgcgccagtccctcgccctcttccaagtccagatcataggcgggctgccccgcgccgctgacggctgcagccgcagtagttacaggagcaggaagagccttttgtggctgttgttgtagctgctgctgagaagggggctgttgctgggggcgcatctgtcgcagcacgggatgcatctgggcaacaaaaaaacaaaaaaagagggctcgctcccgtaaactggagaagtcggctggcggggtcttagaaatgacgaggctgccaaaccctcgcttgtcgcggaaaccggccgatccggcgcgctaagactcgaaccggggcacaccgcaacgcaaccctggcgattgattctccagactacgggcgcgagccactcccagccccgagaactgagtgttctaaagcttgacgcagcattggctcccatccaggaaaaagccaaaaaaaaaaaaacgacccgcctccgtatcctggaggttttgtgcaggcctgggtcgagacgggagtgccagtaccacgttagctgcggctccagcctgatccgagattcgaaccggggtacacgcgcagcccaacccgttcgcttagcctccaggccacggagacgagccgctgaccgctttcgtttttgcccgtatgtctagagcatcaacgactgtgcacgtctcacgggccaaaccgtgcctaccatgaactacttcatgccgctgcgcaacatctggaaccgcgtacgcgagttcccgcgggcatccaccaccgcctccggtatcacctggatgtccaggtacatctacggttatcaccgcctcatgctggaagacctcgcccctggcgccccggctacagagcgatggcccctataccgccagccgccgccgcactttctcatcggctaccagtacctggtgcgcacctgtaacgattacatctttgacacccgcgcatactcgcgccttaagtataccgagcttgtgcgccctgggcaccagacagtcaactggtcagtcatggccaactgctcctacacaatcaacaccggggcttaccaccgcttcgtggactttgacgacttccaagccaccctcacccaggtgcagcaagccatcctcgcagaaagggttgtagcggacctggcacttgtccagcccatgcgcgggttcgggatcactcgcatgcatggcagagcgggcgaagaagaagtgcccgtggaacgactcatgcaagactactataaagatctggccagatgtcaggataatgcttggggaatggcccatcgcctgcgcatccaacaagccggacccaaagacctggtgctcctcgccaccatccgccgtctcaaaactgcctattttaatttcatcaccagcagcatcgtctcaccctccaaagaggaggaaggagaagaaagagagaaccccgaccgagcgtctagccgcccccgcccgcaagaaacagtgctcagcctaccttgcgattgcgactggttagacgctttcgtcgaaaggttttcagatcccgtggatcttgagacgatcaggtccttgcgcggagtacctacggggcaattaataaaatgcataatcagcgcggtgtccctgcccaacggagagcctcccagtcaccacttcagggagatgcgcggaggcgtcttcactctgagacccagggagaacggtcgtgccgtcaccgagaccatgcgccgccgccgcggagaggtcattgaaagattcatcgaccgtctgcccgtgcgccgccggcgtcgccgcgttccccctcctcctgcagccccacctgaagaggaagagatgttagtggaagaagaagagattgaggaagaaatcccaggggctttcgagctcgaggtgcgcaccaccatcgccgaactcatccgtcttttggaagaagagttgaccgtgtccgcgcgtaactcccagtttttcaactttgccgtggacttctacgaggccatggagcgcttggaagcgctgggcgatgtcagcgagatgccgctgagacgatggatcatgtatttcttcgtcaccgagcacatcgccaccacactcaactaccttttccagcgcctatgcaactatgcggtcttcacccgccacgtggagctcaacctcgcccaggtggtcatgcgcgcgagagatcccgtgggggctgtggtctacagccgcgtctggaacgaggcgggcatgaatgcattctctcaactcattgggcgtatctccaacgacctcgcggccaccgtcgagagagcgggccgcggagatcttcaagaggaagagatcgagcagttcatggccgagatcgcctaccaggacaactctggcgacgtgcaagaaatccttaggcaagccgccgtcaacgataccgagattgattctgttgaactctctttcaggttcaagctcacggggccggtagctttcacccagaggcgtcagatccaggatgtcaaccgccgcgtcgtggcgcatgcgagtcttctgagggcgcagtaccagaacctacccgcgcgcggcgccgacgtaccactgccggccatgccgccgggtcccgaaccgcccctgccgcccggtgcgcgccctcgacaccgcttctaaacatgcaagaagcaacagagccaccgccgcccaaaaggaaaaacaagggcacggtggtagcgcccaaggggcacggaaccctgcaagccatcgacatctccaccaacggacccgtggagatcaagtaccatctgaacctccctcacgccctcgaaaagatcatgcaagtcaatctcctgacactgcctactaacctgactccgcagcgtctcaggaccctggacagctccggcctgcgcgctctcgtcctcgagctccgcccctgccgcgccgaggtctggacttgcctcccgcgagggctcgtcagcatgaccaccatcgagacagaagatggtcatgccgatgcagacaacatagtagagcgcgaggtacaatcgccaggcctcaattttccactgaaatttctcgtcaaaggaagtcaggtacaactcattcatgaggtgcatcccgtgaatcgatgcgagtactgcggccgtctgtacaagcacaagcatgaatgctcggcgcgtcgcagggagttctacttccatcacatcaacagccattcctccaactggtggcaggagatccagttcttcccgattggctctcatcctcgcacagaaaggctcttcctcacctacgatgtggaaacctacacctggatggggtcctttggcaagcagctaatccccttcatgctggtcatgaaactctctggagaccagcggctcgtcaacatcgcctatgacctggccataaaactcaagtgggatcgctggcggcaggacccccaaaccttctattgcgtcaccccagaaaagatggcagtcgggcagcattttcgtcagtaccgggaccagttacaaacagcactggcagtggacctctggtcctccttcctcaaagcgaaccctcacgtgcacgaatgggccctcgaacactatgctctcactgaccctacagacctcacttttgaagaactcaagaagctgcctcatgtcaggggcacccctcgattcttagaactgtacatagtggggcacaacatcaatggctttgatgagatcgtcttggccgctcaggttatcaataaccgagcagaggtccctcagcctttcagaatcacccgaaatttcatgcccagggccggcaagatcctcttcaatgatgttactttcgctttgcccaaccccgcctacaagaagcgggtggacttccaactctgggaacagggggcctgtgatgacatcgacttcaagtatcaattcctcaaagtcatggtcagggacacttttgccctcactcatacctcgctgcgcaatgcagcccaagcatactctctcccagtggagaagggatgctgtccctacaaggcagtcaatcagttctacatgttgggctcttaccgtgcagaaaaagacgggtttcccctcgaagagtactggaaggatcgcgaagaataccttctcaaccgcgagctgtgggaaaagaaaagccaaccgcgttatgacatcatccaggaaactctcgactactgtgccctggacgtactcgtcaccgccgagctggtagccaagctgcaagagtcatatgcccacttcataagggactctgtaggcctacctcatgcccattttaacatattccagagacctactatctcttccaattcccatgccatctttcgccagatcgtttacagggcggaaaaacccaaccgcaccaatctgggcccgggtcttctcgccccctcacatgaactctatgactatgtgcgagcaagcatcagaggggggcgctgttatcccacttacatcggcatcctcgaagagcccctctatgtctacgatatctgtggcatgtatgcctccgcgctcacccaccccatgccctggggcacccctcttaacccctacgagcgcgcgctggcagttcgagaatggcagatgaccttggatgatcccgccaccatcagctattttgacaaagatttgctaccgggaatatttaccatagatgcggacccccctgatgagttcatgctagaccccctcccccctttctgttcaagaaaaggaggtcgactctgctggaccaatgagcccctccgaggcgaggtagccaccagtgtggatctgataaccctgcacaataggggatggcgagtcagaatagttccggatgaactgacaaccatcttccctgaatggaaatgtgtggcgcgcgagtacgtccagcttaacatcgccgccaaggagcgcgcggacaaggaaaagaaccaaaccatgcgctccatcgccaagcttctatccaatgccctctatggatcatttgccaccaagctggataacaagaagattgtgttttctgaccagatggacgagagtcttatgaaaggcatctctgctggtactgtcaatatcaaatcctcctcgttcctagaaactgacaacctgagtgcagaggtcatgcccgccttcgagagagaatacctaccccaacagctggcgctcctggacagtgatccggaagacagtgaggacgaacagaggcccgcccacttttatacccccccggcggggacccctggtcacgtggcctacacttacaagccaatcacattcttggatgtggaggagggggacatgtgtttacataccgtagagaaggtggaccccctggttgacaacgaccgctacccctcccacgtggcctcctttgtgctggcctggacacgcgcttttgtatcagagtgggctgggttcctctacgaagaggaccgaggcactccgctcgaggacaggcccataaagtcggtctacggggacacggacagcctctttgtcacccagcggggacacgaactcatggaaaccaaaggtaagaaacgcatcaaaaaacatggcggaaaacttgtttttgaccccgatgagccggatctgacctggctcgtggagtgcgaaaccgtctgcgcctcctgcggtgcggatgcatactcccccgaatccattttcctcgcgcccaagctgtatgccctcaaatgtatctactgccccgcctgccataaaacttccaaaggtaagctccgtgccaaaggccacgcggccgaggcgctcaactacgaactcatggtaaactgctacctggccgacatgcagggcgccgatcggcagcggttctcgaccagcaggatgagtctgaagcgcaccctcgcaagcgcccaaccaggcgcgcaccccttcaccgtgacggaaacaaccctgactcggacgctgcgaccatggaaggatcggaccctagcagcgctggacgctcatcgtctgattccctactccaggagccgtcccaacccgcgaaacgaggaggtctgctggatcgagatgccatagagcacatcaccgagctctgggaccggctcgagctcttgcaacagactctttccaaaatgcccatggctgacgggctgaaaccgttgaaaaacttctcctcgctccaggagcttctatcccttgggggagagcgcctcctaacggacttggtgcgggaaaatatccatgtaagggaaatgatgaacgaagtggcccccctgctccgggaggacggcagctgtcgctccctaaactaccatctgcaacccgtaattggggtcatttacggtcccactgggtgcggcaagtctcagctgcttaggaatttgctctcatcccagttaatcaccccggctccagaaacggtattttttatagccccgcaggtggacatgatccccccctcggaactgaaagcctgggaaatgcaaatatgtgagggaaactatgctcccgggccagagggaactttcatcccccaatctggcaccctccgcccaaagtttattaaaatggcttatgatgacctgactcaggagcataactatgatgtttcagacccccggaacgtgttcgcccgtgccgctgcccacggccccatcgctatcattatggatgagtgcatggagaatctggggggtcacaaaggcgtctccaaattttttcatgcttttccctctaagctgcatgataaatttcccaagtgcaccggatacactgtcttggtggttctgcacaatatgaacccgagacgggatctaggcggcaacattgccaacctcaagatccagtccaaaatgcatataatttcccccaggatgcacccgtcccagctcaacagatttgtaaacacctacactaagggcctccccgttgcaattagtctgctcctaaaagatattgtgcaacaccatgcactccgaccttgctatgactgggtgatttataacactaccccggagcaagaggctcttcaatggagctatctccacccccgagacggactaatgcccatgtatctaaacattcaatcccacctttacagggtactggaaaagatccaccgagttctcaatgatcgagaccgatggtccagggcataccgcgcgcgaaaaaccaaataaacattcatttgtttttataaca

SEQ ID NO: 134 - DNA, 4121 bp, Unknown
  Description of Unknown: Human adenovirus 50 sequence
tataaaacgcctggtgatcagaggccgaggtatccagctcaacgacgagtcggttagctcttcgcttggtctgcgaccagacggagtcttccagatcgccggctgtgggagatcttccttcactcctcgtcaggctgtgctgactttggagagttcgtcctcgcagccccgctcgggcggcatcggaactctccagtttgtggaggagtttactccctctgtctacttcaaccccttctccggctctcctggccagtacccggacgagttcataccgaacttcgacgcaatcagcgagtcagtggatggctatgattgatgtctaatggtggcgcggctgagctagctcgactgcgacacctagaccactgccgccgctttcgctgtttcgcccgggaactcaccgagttcatctacttcgaactctccgaggagcaccctcagggtccggcccacggagtgcggattaccatcgaagggggaatagactctcgcctgcatcgcatcttctcccagcggcccgtgctgattgagcgcgaccagggaaatacaaccatctccatctactgcatctgtaaccaccccggattgcatgaaagcctttgctgtcttgtttgtgctgagtttaataaaaactgagttaagaccttcctacggactaccgcttcttcaatcaggactttacaacaccaaccagatcttccagaagacccagacccttcctcctctgatccaggactctaactctaccttaccagcaccctccactactaaccttcccgaaactaacaagcttggatctcatctgcaacaccgcctttcacgaagccttctttctgccaatactaccactcccaaaaccggaggtgagctccgcggtcttcctactgacgacccctgggtggtagcgggttttgtaacgttaggattagttgcgggtgggcttgtgctaatcctttgctacctatacacaccttgctgtgcatatttagtcatattgtgctgttggtttaagaaatgggggccatactagtcgtgcttgctttactttcgcttttgggtctgggctctgctaatctcaatcctcttgatcacaatccatgtctagacttcgacccagaaaattgcacacttacttttgcacccgacacaagccgtctctgtggagttcttattaagtgcggatgggactgcaggtccgttgaaattacacataataacaaaacatggaacaataccttatccaccacatgggagccaggagttcccgagtggtatactgtctctgtccgaggtcctgacggttccattcgcattagtaacaacactttcattttttctgaaatgtgcgatctggccatgtttatgagcaaacagtatgacctatggcctcctagcaaagagaacattgtggcattttccattgcttattgcttggtaacatgcatcatcactgctatcatttgtgtgtgcatacacttgcttatagttattcgccctagacaaagcaatgaggaaaaagagaaaatgccttaacctttttcctcataccttttctttacagcatggcttctgttacagctctaattattgccagcattgtcactgtcgctcacgggcaaacaattgtccatattaccttaggacataatcacactcttgtagggcccccaattacttcagaggttatttggaccaaacttggaagtgttgattattttgatataatttgcaacaaaactgaaccaatatttgtaatctgtaacagacaaaatctcacgttaattaatgttagcaaaatttataacggttactattatggttatgatagatccagtagccaatataaaaattacttagttcgcataactcagcccaaatcaacagtgccaactatgacaataattaaaatggctaataaagcattagaaaattttacattaccaacaacgcccaatgaaaaaaacattccaaattcaatgattgcaattattgcggcggtggcattgggaatggcactaataataatatgcatgttcctatatgcttgttgctataaaaagtttcaacataaacaggatccactactaaattttaacatttaattttttatacagatgatttccactacaatttttatcattactagccttgcagctgtaacttatggccgttcacacctaactgtacctgttggctcaacatgtacactacaaggaccccaagaaggctatgtcacttggtggagaatatatgataatggagggttcgctagaccatgtgatcagcctggtacaaaattttcatgcaacggaagagacttgaccattattaacataacattaaatgagcaaggcttctattatggaaccaactataaaaatagtttagattacaacattattgtagtgccagccaccacttctgctccccgcaaatccactttctctagcagcagtgccaaagcaagcacaattcctaaaacagcttctgctatgttaaagcttcgaaaaatcgctttaagtaattccacagcagctcccaatacaattcctaaatcaacaattggcatcattactgccgtggtagtgggattaatgattatatttttgtgcataatgtactacgcctgctgctatagaaaacatgaacaaaaaggtgatgcattactaaattttgatatttaattttttatagaattatgatattgtttcaatccaatgccactaacactatcaatgtgcagactactttaaaacatgacatggaaaaccacactacctcctatgcatacacaaatattcagcctaaatacgctatgcaactagaaatcaccatactaattgtaattggaattcttatactatctgttattctttattttatattctgccgtcaaatacccaatgttcatagaaattctaaaagacgtcccatctattctcctatgattagtcgtccccatatggctctgaatgaaatctaagatctttttttttcttttacagtatggtgaacatcaatcatgattcctagaaatttcttcttcaccatactcatctgtgctttcaatgtctgtgctactttcacagcagtagccactgcaagcccagactgtataggaccatttgcttcctatgcactttttgcctttgttacttgcatctgcgtgtgtagcatagtctgcctggttattaattttttccaactggtagactggatctttgtgcgaattgcctacctacgtcaccatcccgaataccgcaatcaaaatgttgcggcacttcttaggcttatttaaaaccatgcaggctatgctaccagttattttaattctgctactaccctgcattgccctaccttccaccgccactcgcgctacacctgaacaacttagaaaatgcaaatttcaacaaccatggtcatttcttgattgctaccatgaaaaatctgattttcccacatactggatagtgattgttggaataattaacatactttcatgtacctttttctcaatcacaatataccccacatttaattttgggtggaattctcccaatgcactgggttacccacaagagctagatgaacatatcccactacaacacatacaacaaccactagcattggtagagtatgaaaatgagccacaaccttcactgcctcctgctattagttacttcaacctaaccggcggagatgactgaaatactcaccacctccaattccgccgaggatctgcttgatatggacggccgcgcctcagaacagcgactcgcccaactacgcatccgccagcagcaggaacgcgtgaccaaagagctcagagatgtcatccaaattcaccaatgcaaaaaaggcatattttgtttggtaaaacaagccaagatatcctacgagatcaccgctactgaccatcgcctctcttacgaacttggcccccaacgacaaaaatttacatgcatggtgggaatcaaccctatagttatcacccagcaaagtggagatactaagggttgcattcactgctcttgcgattccaccgagtgcacctacaccctgctgaagaccctatgcggcctaagagacctgctacccatgaattaaaaattaataaa

SEQ ID NO: 135 - DNA, 972 bp, Unknown
  Description of Unknown: Human adenovirus 50 sequence
atgaccaagagagtccggctcagtgattccttcaaccctgtctacccctatgaagacgaaagcacctcccaacacccctttataaacccagggtttatttccccaaatggctttacacaaagcccagacggagttcttactttaaattgtttaaccccactaacaaccacaggcgggcctttacagttaaaagtgggagggggacttatagtggatgacactgatgggaccttacaagaaaacatacgtgttacagcacccattactaaaaataatcattctgtagaactatccattggaaatggattagaaacacaaaacaataaactatgtgccaaattgggaaatgggttaaaatttaacaacggtgacatttgtataaaggatagtattaacaccttatggactggaataaagcctccacctaactgtcaaatagtggaaaacactgatacaaacgatggcaaacttactttagtattagtaaaaaacggaggacttgttaatggctacgtatctctagttggtgtatcagacactgtgaaccaaatgttcacacaaaagtcagcaaccatacaattaagattatatttcgactcttctggaaatctattaactgatgaatcaaacttaaaaattccacttaaaaataaatcttctacagcaaccagtgaagctgcaaccagcagcaaagcctttatgccaagtactacagcttatccctttaacaccactactagggatagtgaaaactatattcatggaatatgttactatatgactagttatgatagaagtctagttcccttaaacatttctataatgctaaacagccgtacgatttcttccaatgttgcctatgccatacaatttgaatggaatctaaatgcaaaagaatctccagaaagcaacatagctacgctgaccacatccccctttttcttttcttatattagagaagacgacaactaa

SEQ ID NO: 136 - DNA, 273 bp, Unknown
  Description of Unknown: Human adenovirus 50 sequence
gacggagttcttactttaaattgtttaaccccactaacaaccacaggcgggcctttacagttaaaagtgggagggggacttatagtggatgacactgatgggaccttacaagaaaacatacgtgttacagcacccattactaaaaataatcattctgtagaactatccattggaaatggattagaaacacaaaacaataaactatgtgccaaattgggaaatgggttaaaatttaacaacggtgacatttgtataaaggatagtattaacacc

SEQ ID NO: 137 - DNA, 570 bp, Unknown
  Description of Unknown: Human adenovirus 50 sequence
ttatggactggaataaagcctccacctaactgtcaaatagtggaaaacactgatacaaacgatggcaaacttactttagtattagtaaaaaacggaggacttgttaatggctacgtatctctagttggtgtatcagacactgtgaaccaaatgttcacacaaaagtcagcaaccatacaattaagattatatttcgactcttctggaaatctattaactgatgaatcaaacttaaaaattccacttaaaaataaatcttctacagcaaccagtgaagctgcaaccagcagcaaagcctttatgccaagtactacagcttatccctttaacaccactactagggatagtgaaaactatattcatggaatatgttactatatgactagttatgatagaagtctagttcccttaaacatttctataatgctaaacagccgtacgatttcttccaatgttgcctatgccatacaatttgaatggaatctaaatgcaaaagaatctccagaaagcaacatagctacgctgaccacatccccctttttcttttcttatattagagaagacgacaac

SEQ ID NO: 138 - DNA, 1683 bp, Unknown
  Description of Unknown: Human adenovirus 50 sequence
atgaggcgaaccgtgctaggcggagcggtggtgtatccggagggtcctcctccttcgtacgagagcgtgatgcagcaggcggcggcggcggcgatgcagccaccactggaggctccctttgtaccccctcggtacctggcacctacggaggggagaaacagcattcgttactcggagctggcaccattgtatgataccacccggttgtatttggtggacaacaagtccgcggacatcgcctcactgaactatcagaacgaccacagcaacttcctcaccacggtggtgcaaaacaatgactttacccccacggaggccagcacccagaccatcaactttgacgagcggtcgcgatggggcggtcagctgaagactatcatgcacaccaacatgcccaacgtgaacgagtacatgtttagcaacaagttcaaagctcgggtgatggtgtctagaaaggctcctgaaggtgtcacagtagatgacaattatgatcacaagcaggatattttggaatatgagtggtttgagtttactctaccggaagggaacttctcagccacaatgaccattgacctaatgaacaatgccatcattgataattaccttgaagtgggcagacagaatggagtgttggagagtgacattggtgttaaatttgacaccaggaactttagactgggttgggatccggaaactaagttgattatgcctggggtttacacctatgaggcattccatcctgacattgtattgttgcctggttgcggagttgactttactgaaagtcgccttagtaacttgcttggtatcaggaaaagacacccattccaggagggttttaagatcttgtatgaggatcttgaagggggtaatatcccggccctgttggatgtagaagcctataagaacagtaagaaagaacgagaagccaaaacagaagccgctaaagctgctgctattgctaaagccaacatagttgtcagcgaccctgtaagggtggctaatgccgaagaagtcagaggagacaactatacagcttcatctgttgcaactgaagaatcgctattggctgctgtggccgaaactacagagaccaaactcactattaaacctgtagaaaaagacagcaagagtagaagttacaatgtcttggaagataaagtgaatacagcctaccgcagctggtacctgtcctacaactatggtgaccctgaaaaaggagtccgttcctggacactgctcaccacctcggatgtcacctgtggagcagagcaggtgtactggtcgctcccagacatgatgcaggaccctgtcacattccgttccacgagacaagtcagcaactatccagtggtaggtgcagagctcatgccggtcttctcaaagagtttctacaacgagcaagccgtgtactcccagcagcttcgccagtccacctcgctcacgcacgtcttcaaccgcttccctgagaaccagatcctcatccgcccgccagcgcccaccattaccaccgtcagtgaaaacgttcctgctctcacagatcacgggaccctgccgttgcgcagcagtatccggggagtccagcgcgtgaccgttactgacgccagacgccgcacctgcccctacgtctacaaggccctgggcatagtcgcgccgcgcgtcctttcaagccgcactttctaa

SEQ ID NO: 139 - DNA, 2823 bp, Unknown
  Description of Unknown: Human adenovirus 50 sequence
atggccaccccatcgatgctgccccagtgggcatacatgcacatcgccggacaggatgcttcggagtacctgagtccgggtctggtgcagttcgcccgcgccacagacacctacttcaatctggggaacaagtttaggaaccccaccgtggcgcccacccatgatgtgaccaccgaccgcagtcagcggctgatgctgcgctttgtgcccgttgaccgggaagacaatacctacgcatacaaagttcgatacaccttggctgtgggcgacaacagagtgctggatatggccagcactttctttgacattcggggtgtgttggatagaggtcctagcttcaagccatattctggcactgcttacaactcattggcccctaagggcgctcccaatacatctcagtggcttaataagggagatgaagaggatggggaagacgaccaacaagctacatacacttttggcaatgcgccagtaaaagccgaagctgaaattacaaaagaaggactgccaataggtttggaagttccatctgaaggtggccctaaacccatttatgctgataaactgtatcagccagaacctcaggtgggagaggaatcttggactgatacggatggcacagatgaaaaatatggaggcagagcacttaaacctgaaactaaaatgaaaccctgctacgggtctttcgctaaacctactaatgttaaaggcgggcaggcaaaagtgaagaaagaagaagaaggcaaggttgaatatgacattgacatgaactttttcgacctaagatcacaaatgactggcctcaagcctaaaattgtaatgtatgcagaaaatgtggatctagaaactcctgacactcatgtggtgtacaaacctggagcttcagatgctagctctcatgcaaaccttggtcaacagtccatgcccaatagacctaactatattggcttcagggacaacttcatcggactcatgtactacaacagtactggcaacatgggagtgctggctggacaagcgtctcagctaaatgcagtggttgacttgcaagacagaaacacagaattgtcatatcaactcttgcttgattctctgggggacagaaccagatatttcagtatgtggaatcaagcagtggatagctatgacccagatgtgcgtgttattgagaaccatggtgtggaagatgaacttcctaactattgttttccattggatggtgtaggtccgcgaatagacagttacaagggaattgagacaaatggtgatgaaaccactacttggaaagatttagagccaaagggcataagtgaaattgctaagggaaatccgtttgccatggaaattaacctccaagctaatctctggagaagttttctttattccaatgtggctctgtatctcccagactcctacaaatacaccccagccaatgtcactcttccaactaacaccaacacttatgactacatgaatgggcgggtggttcccccatccctggtggatacctacgtaaacattggcgccagatggtctttggatgccatggacaatgtcaacccctttaaccatcaccgcaacgctggcctgcgataccggtccatgcttttgggcaatggtcgttacgtgcctttccacattcaagtgcctcagaaattctttgctgtgaagaacctgctgcttctacccggttcttacacctacgagtggaacttcagaaaggatgtgaacatggtcctgcagagttcccttggtaatgatctccgggtcgatggtgccagcataagttttaccagcatcaatctctatgccaccttcttccccatggcccacaacactgcctccacccttgaagccatgctgcgcaatgacaccaatgatcaatcattcaatgactacctttctgctgccaacatgctctaccccatcccggccaacgctaccaacgttcccatctccattccctctcgcaactgggccgccttcagaggctggtccttcaccagactcaaaaccaaggagactccctctttgggatcagggttcgatccctactttgtttactctggttctataccctacctggatggtaccttctaccttaaccacactttcaagaaagtctccatcatgtttgactcttcagtgagctggcctggtaatgacagattgctaagtccaaatgagttcgaaatcaagcgcacagttgatggggaaggctacaatgtggcccaatgtaacatgaccaaagactggttcctggtccagatgcttgccaactacaacattggataccagggcttctacgttcctgagggttacaaggatcgcatgtactccttcttcagaaacttccagcccatgagtagacaggtggttgatgagattaactacaaagactataaagctgtcgccgtaccctaccagcataataactctggctttgtgggttacatggctcctaccatgcgtcagggtcaagcgtaccctgctaactacccataccccctaattggaaccactgcagtaaccagtgtcacccagaaaaaattcctgtgcgacaggaccatgtggcgcatcccattctctagcaacttcatgtccatgggtgcccttacagacctgggacagaacttgctgtatgccaactcggcccatgcgctggacatgacttttgaggtggatcccatggatgagcccaccctgctttatcttcttttcgaagtcttcgacgtggtcagagtgcaccagccacaccgcggcgtcatcgaggccgtctacctgcgcacaccgttctcggccggcaacgccaccacataa

SEQ ID NO: 140 - protein, 323 aa, Unknown
  Description of Unknown: Human adenovirus 50 sequence
MTKRVRLSDSFNPVYPYEDESTSQHPFINPGFISPNGFTQSPDGVLTLNCLTPLTTTGGPLQLKVGGGLIVDDTDGTLQENIRVTAPITKNNHSVELSIGNGLETQNNKLCAKLGNGLKFNNGDICIKDSINTLWTGIKPPPNCQIVENTDTNDGKLTLVLVKNGGLVNGYVSLVGVSDTVNQMFTQKSATIQLRLYFDSSGNLLTDESNLKIPLKNKSSTATSEAATSSKAFMPSTTAYPFNTTTRDSENYIHGICYYMTSYDRSLVPLNISIMLNSRTISSNVAYAIQFEWNLNAKESPESNIATLTTSPFFFSYIREDDN

SEQ ID NO: 141 - protein, 91 aa, Unknown
  Description of Unknown: Human adenovirus 50 sequence
DGVLTLNCLTPLTTTGGPLQLKVGGGLIVDDTDGTLQENIRVTAPITKNNHSVELSIGNGLETQNNKLCAKLGNGLKFNNGDICIKDSINT

SEQ ID NO: 142 - protein, 190 aa, Unknown; identical to SEQ ID NO: 94
  Description of Unknown: Human adenovirus 50 sequence

SEQ ID NO: 143 - protein, 560 aa, Unknown
  Description of Unknown: Human adenovirus 50 sequence
MRRTVLGGAVVYPEGPPPSYESVMQQAAAAAMQPPLEAPFVPPRYLAPTEGRNSIRYSELAPLYDTTRLYLVDNKSADIASLNYQNDHSNFLTTVVQNNDFTPTEASTQTINFDERSRWGGQLKTIMHTNMPNVNEYMFSNKFKARVMVSRKAPEGVTVDDNYDHKQDILEYEWFEFTLPEGNFSATMTIDLMNNAIIDNYLEVGRQNGVLESDIGVKFDTRNFRLGWDPETKLIMPGVYTYEAFHPDIVLLPGCGVDFTESRLSNLLGIRKRHPFQEGFKILYEDLEGGNIPALLDVEAYKNSKKEREAKTEAAKAAAIAKANIVVSDPVRVANAEEVRGDNYTASSVATEESLLAAVAETTETKLTIKPVEKDSKSRSYNVLEDKVNTAYRSWYLSYNYGDPEKGVRSWTLLTTSDVTCGAEQVYWSLPDMMQDPVTFRSTRQVSNYPVVGAELMPVFSKSFYNEQAVYSQQLRQSTSLTHVFNRFPENQILIRPPAPTITTVSENVPALTDHGTLPLRSSIRGVQRVTVTDARRRTCPYVYKALGIVAPRVLSSRTF

SEQ ID NO: 144 - protein, 940 aa, Unknown
  Description of Unknown: Human adenovirus 50 sequence
MATPSMLPQWAYMHIAGQDASEYLSPGLVQFARATDTYFNLGNKFRNPTVAPTHDVTTDRSQRLMLRFVPVDREDNTYAYKVRYTLAVGDNRVLDMASTFFDIRGVLDRGPSFKPYSGTAYNSLAPKGAPNTSQWLNKGDEEDGEDDQQATYTFGNAPVKAEAEITKEGLPIGLEVPSEGGPKPIYADKLYQPEPQVGEESWTDTDGTDEKYGGRALKPETKMKPCYGSFAKPTNVKGGQAKVKKEEEGKVEYDIDMNFFDLRSQMTGLKPKIVMYAENVDLETPDTHVVYKPGASDASSHANLGQQSMPNRPNYIGFRDNFIGLMYYNSTGNMGVLAGQASQLNAVVDLQDRNTELSYQLLLDSLGDRTRYFSMWNQAVDSYDPDVRVIENHGVEDELPNYCFPLDGVGPRIDSYKGIETNGDETTTWKDLEPKGISEIAKGNPFAMEINLQANLWRSFLYSNVALYLPDSYKYTPANVTLPTNTNTYDYMNGRVVPPSLVDTYVNIGARWSLDAMDNVNPFNHHRNAGLRYRSMLLGNGRYVPFHIQVPQKFFAVKNLLLLPGSYTYEWNFRKDVNMVLQSSLGNDLRVDGASISFTSINLYATFFPMAHNTASTLEAMLRNDTNDQSFNDYLSAANMLYPIPANATNVPISIPSRNWAAFRGWSFTRLKTKETPSLGSGFDPYFVYSGSIPYLDGTFYLNHTFKKVSIMFDSSVSWPGNDRLLSPNEFEIKRTVDGEGYNVAQCNMTKDWFLVQMLANYNIGYQGFYVPEGYKDRMYSFFRNFQPMSRQVVDEINYKDYKAVAVPYQHNNSGFVGYMAPTMRQGQAYPANYPYPLIGTTAVTSVTQKKFLCDRTMWRIPFSSNFMSMGALTDLGQNLLYANSAHALDMTFEVDPMDEPTLLYLLFEVFDVVRVHQPHRGVIEAVYLRTPFSAGNATT

SEQ ID NO: 145 - DNA, 35343 bp, Human mastadenovirus B
ctatctatataatataccttatagatggaatggtgccaacatgtaaatgaggtaatttaaaaaagtgcgcgctgtgtggtgattggctgcggggttaacggctaaaaggggcggcgcgaccgtgggaaaatgacgtgacttatgtgggaggagttatgttgcaagttattacggtaaatgtgacgtaaaacgaggtgtggtttgaacacggaagtagacagttttcccacgcttactgacaggatatgaggtagttttgggcggatgcaagtgaaaattctccattttcgcgcgaaaactaaatgaggaagtgaatttctgagtcatttcgcggttatgccagggtggagtatttgccgagggccgagtagactttgaccgtttacgtggaggtttcgattaccgtgtttttcacctaaatttccgcgtacggtgtcaaagttctgtgtttttacgtaggtgtcagctgatcgctagggtatttaaacctgacgagttccgtcaagaggccactcttgagtgccagcgagaagagttttctcctccgcgccgcaagtcagttctgcgctttgaaaatgagacacctgcgcttcctgccacaggaggttatctccagtgagaccgggatcgaaatactggagtttgtggtaaataccctaatgggagacgacccggaaccgccagtgcagcctttcgatccacctacgctgcacgatctgtatgatttagagatagacgggccggaggatcccaatgaggaagctgtgaatgggttttttactgattctatgctgctagctgctgatgaaggattggacataaaccctcctcctgagacacttgttaccccaggggtggttgtggaaagcggcataggtgggaaaaaattgcctgatctgggagcagctgaaatggacttgcgttgttatgaagagggttttcctcccagtgatgatgaagatggggaaactgagcagtccatccataccgcagtaaatgagggagtaaaagctgccagcgatgtttttaagttggactgtccggagctgcctggacatggctgtaagtcttgtgaatttcacaggaataacactggaatgaaagaactattgtgctcgctttgctatatgagaatgcactgccactttatttacagtaagtgtatttaagtgaaatttaaaggaatagtgtagctatttaataactgttgaatggtagatttatgtttttttcttgcgattttttgtaggtcctgtgtctgatgatgagtcaccttctcctgattcaactacctcacctcctgaaattcaggcgcccgcacctgcaaacgtatgcaagcccattcctgtgaagcctaagcctgggaaacgccctgctgtggataagcttgaggacttgttggagggtggggatggacctttggaccttagtacccggaaactgccaaggcaatgagtgccctgcagctgtgtttatttaatgtgacgtcatgtaataaaattatgtcagctgctgagtgttttattacttcttgggtggggacttggatatataagtaggagcagatctgtgtggttagctcacagcaacctgctgccatccatggaggtttgggctatcttggaagacctcagacagactaagctactgctagaaaacgcctcggacggagtctctggcctttggagattctggttcggtggtgatctagctaggctagtgtttaggataaaacaggactacagggaagaatttgaaaagttattggacgatagtccgggactttttgaagctcttaacttgggtcatcaggctcattttaaggagaaggttttatcagttttagatttttctactcctggtagaactgctgctgctgtagcttttcttacttttatattggataaatggatccgccaaactcacttcagcaagggatacgttttggatttcatagcagcagctttgtggagaacatggaaggctcgcaggatgaggacaatcttagattactggccagtgcagcctctgggagtagcagggatactgagacacccaccgaccatgccagcggttctgcaggaggagcagcaggaggacaatccgagagccggcctggaccctccggtggaggagtagctgacctgtttcctgaactgcgacgggtgcttactaggtctacgaccagtggacagaacaggggaattaagagggagaggaatcctagtgggaataattcaagaaccgagttggctttaagtttaatgagccgcaggcgtcctgaaactgtttggtggcatgaggttcagagcgaaggcagggatgaagtttcaatattgcaggagaaatattcactagaacaacttaagacctgttggttggaacctgaggatgattgggaggtggccattaggaattatgctaagatatctctgaggcctgataaacaatatagaattactaagaagattaatattagaaatgcatgctacatatcagggaatggggcagaggttataatagatacacaagataaagcagtttttagatgttgtatgatgggtatgtggccaggggttgtcggcatggaagcagtaacacttatgaatattaggtttaaaggggatgggtataatggcattgtatttatggctaacactaagctgattctacatggttgtagcttttttgggtttaataatacgtgtgtagaagcttgggggcaagttagtgtgaggggttgtagtttttatgcatgctggattgcaacatcaggtagggtcaagagtcagttgtctgtgaagaaatgcatgtttgagagatgtaatcttggcatactgaatgaaggtgaagcaagggtccgccactgcgcagctacagaaactggctgcttcattctaataaagggaaatgccagtgtgaagcataatatgatctgtggacattcggatgagaggccttatcagatgctgacctgcgctggtggacattgcaatattcttgctaccgtgcatatcgtttcacatgcacgcaaaaaatggcctgtatttgaacataatgtgattaccaagtgcaccatgcacataggtggtcgcaggggaatgtttatgccttaccagtgtaacatgaatcatgtgaaggtaatgttggaaccagatgccttttccagagtgagcttaacaggaatctttgatatgaatattcaactatggaagatcctgagatatgatgacactaaaccaagggtgcgcgcatgcgaatgcggaggcaagcatgctagattccagccggtgtgcgtggatgtgactgaagacttgagacccgatcatttggtgcttgcctgcactggagcggagttcggttctagtggtgaagaaactgactaaagtgagtagtggggcaagatgtggatggggactttcaggttggtaaggtgggcagattgggtaaattttgttaatttctgtcttgcagctgccatgagtggaagcgcttcttttgaggggggagtatttagcccttatctgacgggcaggctcccaccatgggcaggagttcgtcagaatgtcatgggatccactgtggatgggagacccgtccagcccgccaattcctcaacgctgacctatgccactttgagttcgtcaccattggatgcagctgcagccgccgccgctactgctgccgccaacaccatccttggaatgggctattatggaagcatcgttgccaattccagttcctctaataacccttcaaccctggctgaggacaagctacttgttctcttggcgcagctcgaggccttaacccaacgcttaggcgaactgtctaagcaggtggcccagttgcgtgagcaaactgagtctgctgttgccacagcaaagtctaaataaagatctcaaatcaataaataaagaaatacttgatataaaacaaatgaatgtttatttgatttttcgcgcgcggtatgccctggaccatcggtctcgatcattgagaacgcggtggatcttttccagtaccctgtaaaggtgggattgaatgtttagatacatgggcattagtccgtctcgggggtggagatagctccattgaagagcctcttgctccggggtagtgttataaatcacccagtcatagcaaggtcggagtgcatggtgttgcacaatatcttttaggagcagactaattgcaacggggaggcccttagtgtaggtgtttacaaatctgttgagctgggacgggtgcatccggggtgaaattatatgcattttggactggatcttgaggttggcaatgttgccgcctagatcccgtctcgggttcatattgtgcaggaccaccaagacagtgtatccggtgcacttgggaaatttatcatgcagcttagagggaaaagcatgaaaaaatttggagacgcctttgtgaccccccagattctccatgcactcatccataatgatagcgatggggccgtgggcagcggcacgggcgaacacgttccgggggtctgaaacatcatagttatgctcctgagtcaggtcatcataagccattttaataaactttgggcggagggtgccagattgggggatgaaagttccctctggcccgggagcatagtttccctcacatatttgcatttcccaggctttcagttcagagggggggatcatgtccacctgcggggctataaaaaataccgtttctggagccggggtgattaactgggacgagagcaaattcctaagcagctgagacttgccgcacccagtgggaccgtaaatgaccccaattacgggttgcagatggtagtttagggaacgacagctgccgtcctcccggagcaggggggccacttcgttcatcatttcccttacatggatattttcccgcaccaagtccgttaggaggcgctctcccccaagggatagaagctcctggagcgaggagaagtttttcagcggcttcagcccgtcagccatgggcattttggaaagagtctgttgcaagagctcgagccggtcccagagctcggtgatgtgctctatggcatctcgatccagcagacctcctcgtttcgcgggttgggacggctcctggagtagggaatcagacgatgggcgtccagcgctgccagggtccgatccttccatggtcgcagcgtccgagtcagggttgtttccgtcacggtgaaggggtgcgcgcctggttgggcgcttgcgagggtgcgcttcagactcatcctgctggtcgagaaccgctgccgattggcgccctgcatgtcggccaggtagcagtttaccatgagttcgtagttgagcgcctcggccgcgtggcctttggcacggagcttacctttggaagttttatggcaggcggggcagtagatacatttgagggcatacaacttgggcgcgaggaaaatggattcgggggagtatgcatccgcaccgcaggaggcgcagacggtttcgcactccacgagccaggtcagatccggctcatcggggtcaaaaacaagttttccgccatgttttttgatgcgtttcttacctttggtttccatgagttcgtgtccccgctgggtgacaaagaggctgtccgtgtccccgtagaccgactttatgggcctgtcctcgagcggagtgcctcggtcctcttcgtagaggaacccagcccactctgatacaaaagcgcgtgtccaggccagcacaaaggaggccacgtgggaggggtagcggtcgttgtcaaccagggggtccaccttctctacggtatgtaaacacatgtccccctcctccacatccaagaatgtgattggcttgtaagtgtaggccacgtgaccaggggtccccgccgggggggtataaaagggggcgggcctctgttcgtcctcactgtcttccggatcgctgtccaggagcgccagctgttggggtaggtattccctctcgaaggcgggcatgacctctgcactcaggttgtcagtttctaggaacgaggaggatttgatattgacagtaccagcagagatgcctttcataagactctcgtccatctggtcagaaaacacaatcttcttgttgtccagcttggtggcaaatgatccatagagggcattggatagaagcttggcgatggagcgcatggtttggttcttttccttgtccgcgcgctccttggcggtgatgttaagctggacgtactcgcgcgccacacatttccattcaggaaagatggttgtcagttcatccggaactattctgattcgccatcccctattgtgcagggttatcagatccacactggtggccacctcgcctcggaggggctcattggtccagcagagtcgacctccttttcttgaacagaaaggggggagggggtctagcatgaactcatcaggggggtccgcatctatggtaaatattcccggtagcaaatctttgtcaaaatagctgatggtggcgggatcatccaaggtcatctgccattctcgaactgccagcgcgcgctcataggggttaagaggggtgccccagggcatggggtgggtgagcgcggaggcatacatgccacagatatcgtagacatagaggggctcttcgaggatgccgatgtaagtgggataacatcgcccccctctgatgcttgctcgcacatagtcatagagttcatgtgagggggcaagaagacccgggcccagattggtgcggttgggtttttccgccctgtaaacgatctggcgaaagatggcatgggaattggaagagatagtaggtctctggaatatgttaaaatgggcatgaggtaagcctacagagtcccttatgaagtgggcatatgactcttgcagcttggctaccagctcggcggtgatgagtacatccagggcacagtagtcgagagtttcctggatgatgtcataacgcggttggcttttcttttcccacagctcgcggttgagaaggtattcttcgtgatccttccagtactcttcgaggggaaacccgtctttttctgcacggtaagagcccaacatgtagaactgattgactgccttgtagggacagcatcccttctccactgggagagagtatgcttgggctgcattgcgcagcgaggtatgagtgagggcaaaagtgtccctgaccatgactttgaggaattgatacttgaagtcgatgtcatcacaggccccctgttcccagagttggaagtccacccgcttcttgtaggcggggttgggcaaagcgaaagtaacatcattgaagaggatcttgccggccctgggcatgaaatttcgggtgattttgaaaggctgaggaacctctgctcggttattgataacctgagcggccaagacgatctcatcaaagccattgatgttgtgccccactatgtacagttctaagaatcgaggggtgcccctgacatgaggcagcttcttgagttcttcaaaagtgagatctgtagggtcagtgagagcatagtgttcgagggcccattcgtgcacgtgagggttcgctttaaggaaggaggaccagaggtccactgccagtgctgtttgtaactggtcccggtactgacgaaaatgctgtccgactgccatcttttctggggtgacgcaatagaaggtttgggggtcctgccgccagcgatcccacttgagttttatggcgaggtcataggcgatgttgacgagccgctggtctccagagagtttcatgaccagcatgaaggggattagctgcttgccaaaggaccccatccaggtgtaggtttccacatcgtaggtgagaaagagcctttctgtgcgaggatgagagccaatcgggaagaactggatctcctgccaccagttggaggaatggctgttgatgtgatggaagtagaactccctgcgacgcgccgagcattcatgcttgtgcttgtacagacggccgcagtactcgcagcgattcacgggatgcaccttatgaatgagttgtacctgacttcctttgacgagaaatttcagtggaaaattgaggcctggcgcttgtacctcgcgctttactatgttgtctgcatcggcatgaccatcttctgtctcgatggtggtcatgctgacgagccctcgcgggaggcaagtccagacctcggcgcggcaggggcggagctcgaggacgagagcgcgcaggccggagctgtccagggtcctgagacgctgcggagtcaggttagtaggcagtgtcaggagattaacttgcatgatcttttggagggcgtgagggaggttcagatagtacttgatctcaacgggtccgttggtggagatgtcgatggcttgcagggttccgtgtcccttgggcgctaccaccgtgcccttgtttttcattttggacggcggtggctctgttgcttcttgcatgtttagaagcggtgtcgagggcgcgcaccgggcggcaggggcggctcgggacccggcggcatggctggcagtggtacgtcggcgccgcgcgcgggtaggttctggtactgcgccctgagaagactcgcatgcgcgacgacgcggcggttgacatcctggatctgacgcctctgggtgaaagctaccggccccgtgagcttgaacctgaaagagagttcaacagaatcaatctcggtatcgttgacggcggcttgcctaaggatttcttgcacgtcgccagagttgtcctggtaggcgatctcggccatgaactgctcgatctcttcctcttgaagatctccgcggcccgctctctcgacggtggccgcgaggtcgttggagatgcgcccaatgagttgagagaatgcattcatgcccgcctcgttccagacgcggctgtagaccacagcccccacgggatctctcgcgcgcatgaccacctgggcgaggttgagctccacgtggcgggtgaagaccgcatagttgcataggcgctggaaaaggtagttgagtgtggtggcgatgtgctcggtgacgaagaaatacatgatccatcgtctcagcggcatctcgctgacatcgcccagcgcttccaagcgctccatggcctcgtagaagtccacggcaaagttaaaaaactgggagttacgcgcggacacggtcaactcctcttccagaagacggataagttcggcgatggtggtgcgcacctcgcgctcgaaagcccctgggatttcttcctcaatctcttcttcttccactaacatctcttcctcttcaggtggggctgcaggaggagggggaacgcggcgacgccggcggcgcacgggcagacggtcgatgaatctttcaatgacctctccgcggcggcggcgcatggtctcggtgacggcacgaccgttctccctgggtctcagagtgaagacgcctccgcgcatctccctgaagtggtgactgggaggctctccgttgggcagggacaccgcgctgattatgcattttatcaattgccccgtaggtactccgcgcaaggacctgatcgtctcaagatccacgggatctgaaaacctttcgacgaaagcgtctaaccagtcgcaatcgcaaggtaggctgagcactgtttcttgcgggcgggggcggctagacgctcggtcggggttctctctttcttctccttcctcctcttgggagggtgagacgatgctgctggtgatgaaattaaaataggcagttttgagacggcggatggtggcgaggagcaccaggtctttgggtccggcttgttggatacgcaggcgatgagccattccccaagcattatcctgacatctggccagatctttatagtagtcttgcatgagtcgttccacgggcacttcttcttcgcccgctctgccatgcatgcgagtgatcccgaacccgcgcatgggctggacaagtgccaggtccgctacaaccctttcggcgaggatggcttgctgcacctgggtgagggtggcttggaagtcgtcaaagtccacgaagcggtggtaggccccggtgttgattgtgtaggagcagttggccatgactgaccagttgactgtctggtgcccagggcgcacgagctcggtgtacttgaggcgcgagtatgcgcgggtgtcaaagatgtaatcgttgcaggtgcgcaccaggtactggtagccaatgagaaagtgtggcggtggctggcggtacaggggccatcgctctgtagccggggctccgggggcgaggtcttccagcatgaggcggtggtagccgtagatgtacctggacatccaggtgataccggaggcggtggtggatgcacgtgggaactcgcgcacgcggttccagatgttgcgcagcggcatgaagtagttcatggtaggcacggtctggccagtgaggcgcgcgcagtcattgacgctctgtagacacggagaaaacgaaagcgatgagcggctcgactccgtggtctgggggaacgtgaacgggttgggtcgcggtgtaccccggttcgagtccaaagctaagcgatcacgctcggatcggccggagccgcggctaacgtggtattggctatcccgtctcgacccagccgacgaatatccagggtacggagtagagtcgtttttgctgctttttcctggacgtgtgccattgccacgtcaagctttagaacgctcagttctcgggccgtgagtggctcgcgcccgtagtctggagaatcagtcgccagggttgcgttgcggtatgccccggttggagcctaagcgcggctcgtatcggccggtttccgcgacaagcgagggtttggcagccccgttatttccaagaccccgccagccgacttctccagtttacgggagcgagcccttttttttttttttttgtttttgtcgcccagatgcatccagtgctgcgacagatgcgcccccagcaacaggccccttctcagcaacagccacaaaaggctcttcttgctcctgcaactactgcagctgcagccgtgagcggcgcgggacagcccgcctatgatctggacttggaagagggcgagggattggcgcgcctgggggctccatcgcccgagcggcacccgcgggtgcaactaaaaaaggactctcgcgaggcgtacgtgccccagcagaacctgttcagggacaggagcggcgaggagccagaggagatgcgagcatctcgatttaacgcgggtcgcgagctgcgccacggtctggatcgaagacgggtgctgcaagacgaggattttgaggtcgatgaagtcacagggatcagcccagctagggcacatgtggccgcggccaacctagtctcggcctacgagcagaccgtgaaggaggagcgcaacttccaaaaatcttttaacaaccatgtgcgcaccctgatcgcccgcgaggaagtgaccctgggtctgatgcatctgtgggacctgatggaggctatcgcccaaaaccccactagcaaaccactgacagctcagctgtttctggtggttcaacatagcagggacaacgaggcattcagggaggcgttgttgaacatcaccgagcctgatgggagatggctgtatgatctgatcaacatcctgcaaagtattatagtgcaggaacgtagcctgggtttggctgagaaagtggcagctatcaactactcggtcttgagcctgggcaaatactacgctcgcaagatctacaagaccccctacgtacccatagacaaggaggtgaagatagatgggttttacatgcgcatgactctgaaggtgctgactctgagcgacgatctgggggtgtatcgcaatgacaggatgcaccgcgcggtgagcgccagcaggaggcgcgagctgagcgacagagaacttatgcacagcttgcaaagagctctaacgggggccgggactgatggggagaactactttgacatgggagcggatttgcaatggcaacccagtcgcagggccatggaggctgcagggtgtgagcttccttacatagaagaggtggatgaagtcgaggacgaggagggcgagtacttggaagactgatggcgcgacccgtatttttgctagatggaacagcagcaggcaccggaccccgcaatgcgggcggcgctgcagagccagccgtccggcattaactcctcggacgattggacccaggccatgcaacgcataatggcgctgacgacccgcaaccccgaagcctttagacagcaaccccaggccaaccgcctttctgccatactggaggccgtagtgccctcccgctccaaccccacccacgagaaggtcctggctatcgtgaacgcgctggtggagaacaaggccatccgtcccgatgaggccgggctggtatacaatgctctcttggagcgcgtggcccgttacaacagcagcaacgtgcaaaccaacctggaccggatggtgaccgatgtgcgcgaggccgtgtctcagcgcgagcgattccagcgcgacgccaacttggggtcgttggtagcgctaaacgctttcctcagcacccagcccgccaacgtgccccgtggtcagcaagactatacaaactttttgagtgcattgagactcatggtagctgaggtgccccagagcgaggtgtaccagtccgggccagattacttcttccagaccagcagacagggcttgcagacagtgaacctgactcaggctttcaagaacctgaagggtctgtggggagtgcacgccccagtaggggatcgcgcgaccgtgtctagcttgctgactcccaactcccgcctgctgctgctgctggtatccccctttactgacagcggtagcattgaccgcaactcgtacttgggctacctgcttaacctgtatcgcgaggccataggacagagccaggtggacgagcagacctatcaagaaatcacccaagtgagccgcgccctgggtcaggaagacacgggcagtttggaagccaccctgaacttcttgctaaccaaccggtcacagaagatccctcctcagtatgcgcttaccgctgaggaggagcggatcctcagatacgtgcaacagagcgttggactgttcctgatgcaggagggggcgacacctaccgccgcgctggacatgacagctcgaaacatggagcccagcatgtatgctagtaacaggcctttcattaacaaactgctggactacctgcacagggcggccgccatgaactctgattatttcaccaatgctatcctgaacccacactggctgcccccacctggtttctacactggcgagtacgacatgcccgaccccaatgacgggttcctgtgggacgatgtggacagcagcatattttccccgcctcccggttatacagtttggaagaaggaagggggcgatagaagacactcttccgtgtcgctatccggaacggctggtgctgccgcgaccgtgcccgaagctgcaagtcctttccctagcttgcccttttcactaaacagcgttcgcagcagtgaactggggagaataacccgcccgcgcttgatgggcgaggatgagtacttgaatgactctttgctgaggccagagagggaaaagaacttccccaacaatggaatagagagtctggtggataagatgagtagatggaagacctatgcgcaggatcacagagacgagcccaggatcttgggggctacaagcagaccgatccgtagacgccagcgccacgacaggcagatgggtcttgtgtgggacgatgaggactctgccgatgatagcagcgtgttggacttgggtggaagaggagggggcaacccgttcgctcatctgcgtcccagattcgggcgcatgttgtaaaagtgaaagtaaaataaaaaggcaactcaccaaggccatggcgaccgagcgtgcgttcgttcttttttgttatctgtgtctagtacgatgaggagacgagccgtgctaggcggagcggtggtgtatccggagggtcctcctccttcttacgagagcgtgatgcagcaacaggcggcgatgatacagcccccactggaggctcccttcgtacccccacggtacctggcgcctacggaagggagaaacagcattcgttactcggagctgtcgcccctgtacgataccaccaagttgtatctggtggacaacaagtcggcggacatcgcctccctgaactatcagaacgaccacagcaacttcctgaccacggtggtgcagaacaatgactttacccccacggaggctagcacccagaccatcaactttgacgagcggtcgcgatggggcggtcagctgaagaccatcatgcacaccaacatgcccaacgtgaacgagtacatgttcagcaacaagttcaaggcgagggtgatggtgtccagaaaagctcctgaaggtgttacagtaaatgacacctatgatcataaagaggatatcttgaagtatgagtggtttgagttcattttaccagaaggcaacttttcagccaccatgacgatcgacctgatgaacaatgccatcattgacaactacctggaaattggcagacagaatggagtgctggaaagtgacattggtgttaagtttgacactagaaatttcaggctcgggtgggaccccgaaactaagttgattatgccaggtgtctacacttatgaggcattccatcctgacattgtattgctgcctggttgcggggtagactttactgaaagccgacttagcaacttgcttggcatcaggaagagacatccattccaggagggtttcaaaatcatgtatgaagatcttgaagggggtaatattcctgcccttttggatgtcactgcctatgaggaaagcaaaaaggataccactactgaaacaaccacactggctgttgcagaggaaactagtgaagatgatgatataactagaggagatacctatataactgaaaaacaaaaacgtgaagctgcagctgctgaagttaaaaaagagttaaagatccaacctctagaaaaagacagcaagagtagaagctacaatgtcttggaagacaaaatcaacacagcctaccgcagttggtacctgtcctacaattacggtaaccctgagaaaggaataaggtcttggacactgctcaccacttcagatgtcacctgtggggcagagcaggtctactggtcgctccctgacatgatgcaagacccagtcaccttccgctccacaagacaagtcaacaactacccagtggtgggtgcagagcttatgcccgtcttctcaaagagtttctacaatgagcaagccgtgtactctcagcagctccgacaggccacttcgctcacgcacgtcttcaaccgcttccctgagaaccagatcctcatccgcccgccggcgcccacaattaccaccgtcagtgaaaacgttcctgctctcacagatcacgggaccctgccgttacgcagcagtatccggggagtccagcgcgtgaccgttactgacgccagacgccgcacctgtccctacgtttacaaggccctgggcatagtcgcgccgcgcgttctttcaagccgcactttctaaaaaaaaaaaaaatgtccattctcatctcgcccagtaataataccggttggggactgtatgcgcccaccaagatgtatggaggcgcccgcaagcgctctacccagcatcctgtgcgcgttcgcggtcatttccgcgctccctggggcgcactcaagggtcgtacccgcactcggaccacggtcgatgatgtgatcgaccaggtggtcgccgatgctcgtaattatactcctactgcgcctacatctactgtggatgcagttattgacagtgtggtggcagacgcccgcgcctatgctcgccggaagagccgaaggaggcgcatcgccaggcgccacagggctactcccgccatgcgagccgcaaaagctattctgcggagggccaaacgtgtggggcgaagagccatgcttagagcggccagacgcgcggcttcaggtgccagcagcggcaggtcccgcaggcgcgcggccacggcggcagcagcggccattgccaacatggcccaaccgcgaagaggcaatgtgtactgggtgcgtgatgccactaccggccagcgcgtgcccgtgcgcacccgcccccctcgcacttagaagatactgagcagtctccgatgttgtgtcccagcggcaagtatgtccaagcgcaaatacaaggaagagatgctccaggtcatcgcgcctgaaatctacggtccgccggtgaaggatgaaaaaaagccccgcaaaatcaagcgggtcaaaaataacaaaaaggaagaagatgacgatgatgggctggtggagtttgtgcgcgagttcgccccaagacggcgcgtgcagtggcgcgggcgcaaagtgcgtcaagtgctcagacccgggaccactgtggtttttacacctggcgagcgttccagcactacttttaaacggtcctatgatgaggtgtacggggatgacgatattcttgagcaggcggcagaccgccttgacgagtttgcttatggcaagcgcactagatccagtcccaaagaggaggctgtgtccattcctttggatcatggaaatcccacccccagcctcaaaccagtcaccctgcagcaagtgctgcccgtgcctgcgcggagaggcgtaaagcgcgagggtgaggacctatatcccaccatgcagctaatggtgcccaagcgccagaggctagaagacgtactggagaaaatgaaagtggatgccgatatccagcctgaggtcaaagtaagacctatcaaggaagtggcgccaggtttgggagtacaaaccttcgacatcaagattcccaccgagtccatggaagtgcagaccgaacctgcaaaacccaccacctcaattgaggtgcaaacggaaccctggatgcccgcgcccgttgccgcccccagcaccactcgaagatcacgacgaaagtacggcccagcaagtctgctaatgcccaactatgctctgcacccatccatcattcccactccgggttacagaggcactcgctactatcgaaaccggagcaacacctctcgccgccgcaaaccacctgcaagtcgcactcgccgtcgccgccgccgcaacactgccagcaaattgactcccgccgccctggtgcggagagtgtaccgcgatggtcgcgctgaacctctgacgctgccgcgcgcgcgctaccatccaagcatcaccacttaatgactgttgacgctgcctccttgcagatatggccctcacttgccgccttcgcgtccccattactggctaccgaggaagaaactcgcgccgtagaaggatgttggggcgagggatgcgccgccacagacgaaggcgcgctatcagcagacgattagggggtggctttttgccagctcttatacccatcatcgccgcagcgatcggggcgataccaggcatagcttcagtggcggttcaggcctcgcagcgccactaacattggaaaaaacttataaataaaaaatagaatggactctgacgctcctggtcctgtgactatgtttttgtagagatggaagacatcaatttttcatccctggctccgcgacacggcacgaggccgtacatgggcacctggagcgacatcggcacgagccaactgaacgggggcgccttcaattggagcagtatctggagcgggcttaaaaattttggctcgaccgtaaaaacctatgggaacaaagcttggaacagcagcacagggcaggctctgagaaataagcttaaggaacaaaacttccaacagaaggtggtcgatgggatcgcctctggtattaacggcgtagtggatctggccaaccaggctgtacaaaaacagataaacagccgcctggacccgccgcccgcaacccctggtgaaatggaagtggaggaagaacttcctccgctggaaaagcggggcgacaagcgtccgcgacccgagctagagcagacgctggtgacgcgcgcagacgagcccccttcatatgaggaggcagtaaagctcggaatgcccactaccaggcctgtagctcacatggctaccggggtgatgaaaccttctcagtcacatcgacccgccaccttggacttgcctcctccccctgcttctgcggcgcctgttcccaaacctgtcgctaccagaaagcccaccgccgtacagcccgtcgccgtagccagaccgcgtcctgggggcacaccgcgcccgaaagcaaactggcaaagtactctgaacagcatcgtgggtctgggcgtgcagagtgtaaagcgccgtcgctgctattaattaaatatggagtagcgcttaacttgcttgtctgtgtgtatgtatcatcaccacgccgccgcagcagaggagaaaggaagaggtcgcgcgccgaggctgagttgctttcaagatggccaccccatcgatgatgccccaatgggcatacatgcacatcgccggacaggatgcttcggagtacctcagtccgggtctggtgcagttcgcccgtgcaacagacacctacttcagtatggggaacaaatttagaaaccccacagtggcgcccacccacgatgtgaccaccgaccgtagccagcgcctgatgctgcgcttcgtgcccgttgaccgggaagacaatacctactcttacaaagttcgctacacgctggctgtaggcgacaacagagtgcttgacatggccagcacattctttgacattcggggggtgcttgatagaggtcctagcttcaagccatattccggcacagcttacaattcactcgctcctaagggcgcgcccaatacatctcagtggatagttacaacaaatggggacaatgcagtaactaccaccacaaacacatttggcattgcttccatgaagggagacaatattactaaagaaggtttgcaaattgggaaagacattaccactactgaaggagaagaaaagcccatttatgccgataaaacatatcagccagagcctcaagttggagaagaatcatggactgatactgatggaacaaatgaaaagtttggtggaagagcccttaaaccagctaccaacatgaagccatgctacgggtcttttgcaagacctacaaacataaaagggggccaagctaaaaacagaaaagtaaaaccaacaaccgaaggaggggttgaaactgaggaaccagatattgatatggaatttttcgatggtagagatgctgttgcaggagctttagcgcctgaaattgtgctttatacggaaaatgtaaatttggaaactccagacagtcatgtggtatataaaccagaaacgtctaataactctcatgcaaatttgggtcaacaagccatgcctaacagacccaattacattggcttcagggataacttcgtaggcctaatgtactacaacagtactggaaatatgggagttttggctggccaagcatcacaactgaatgcagtggttgacttgcaggacagaaatactgaactgtcatatcagcttttgcttgattctctgggagacagaaccagatacttcagcatgtggaatcaggctgtggacagttacgatcccgatgttcgcattattgaaaatcatggcatcgaggatgaactgcctaattactgttttcctctgaatggcataggaccagggcacacatatcaaggcattaaagttaaaaccgatgacactaatggatgggaaaaagatgctaatgttgctccagctaatgaaataaccataggcaacaacctggctatggaaattaatatccaagctaacctttggagaagttttctgtactctaatgtggctttgtaccttccagatgtttacaagtacacgccacctaacattactttgcccactaacaccaacacctatgagtacatgaacgggcgagtggtatccccatccctggttgattcatacatcaacattggcgccaggtggtctcttgacccaatggacaatgtgaatccattcaaccaccaccgcaatgctggtctgcgctacaggtccatgcttctgggaaatggtcgttatgtgcctttccacatacaagtgcctcagaaattctttgctgtcaagaacctacttcttctacctggctcctacacctacgagtggaacttccgaaaggatgtgaacatggtcctgcaaagttcccttggaaatgacctcagaacggatggtgctaccataagtttcaccagcatcaatctctatgccaccttcttccccatggctcacaacacagcttccacccttgaagccatgctgcgcaacgataccaatgatcagtcatttaacgactacctctctgcagctaacatgctttaccccattcctgccaatgcaaccaacattccaatttccatcccatctcgcaactgggcagccttcaggggctggtccttcaccagactcaaaaccaaggagactccatctcttggatcagggttcgatccctacttcgtatattctggatctattccctacctggatggcaccttttaccttaaccacactttcaagaaggtctccatcatgtttgactcctcagtcagctggcctggcaatgacaggctgttgagtccaaatgagtttgaaatcaagcgcactgtggacggggaaggatacaacgtggcacaatgcaacatgaccaaagactggttcctggttcagatgcttgccaattacaacattggctaccagggcttttacatccctgagggatacaaggatcgcatgtactcctttttcagaaacttccagcctatgagcaggcaggtggttgatgaggttaattacactgactacaaagccgtcaccttaccataccaacacaacaactctggctttgtagggtaccttgcacctactatgagacaaggggaaccttacccagccaattatccatacccgctcatcggaactactgccgttaagagtgtcacccagaaaaagttcctgtgcgacaggaccatgtggcgcattcccttctccagcaacttcatgtccatgggggcccttaccgacctgggacagaacatgctctatgccaactcagcccatgcgctggacatgacttttgaggtggatcccatggatgagcccaccctgctttatcttcttttcgaagtcttcgacgtggtcagagtgcaccagccacaccgcggcgtcatcgaggccgtctacctgcgcacaccgttctcggccggcaacgccaccacataagaagcctcttgcttcttgcaagcagcagctgcagccatgacatgcgggtccggaaacggctccagcgagcaagagctcaaagccatcgtccgagacctgggctgcggaccctatttcctgggaacctttgacaagcgtttcccggggttcatggcccccgacaagctcgcctgcgccatagtcaacactgccggacgcgagacggggggagagcactggctggcttttggttggaacccgcgctacaacacctgctacctttttgatccttttgggttctcggatgagcggctcaaacagatttaccagtttgagtacgaggggctcctgcgtcgcagtgcccttgctaccaaagaccgctgcatcaccctggagaagtctacccaaagcgtgcagggtccgcgctcagccgcctgtggacttttttgctgtatgttccttcatgcctttgtgcactggcccgaccgccccatggacggaaaccccaccatgaagttgctgactggggtgtccaacagcatgctccaatcaccccaagtccagcccaccctgcgccgcaaccaggaggtgctataccgcttcctaaacacccactcatcttactttcgttctcaccgcgcgcgcattgaaagggccaccgcgtttgaccgtatggatatgcaataagtcatgtaaaaccgtgttcaataaacagcactttatttttacatgcactgaggctctggttttgctcatttgtttcatcatttactcagaagtcgaatgggttctggcgggagtcagagtgacccgcgggcagggatacgttgcggaactgtaacctgttctgccacttgaactcggggattaccagcttgggaactggaatctcgggaaaggtgtcttgccacaactttctggtcagttgcatagcgccaagcaggtcaggagcagagatcttgaaatcacagttggggccggcattctggacacgggagttgcgatacactgggttgcaacactggaacactatcaacgctgggtgtcttacgcttgccaacacggttgggtcactgatggtagtcacatccaagtcttcagcattggccatcccaaagggggtcatcttacatgtctgcctgcccatcacgggagcgcagcctggcttgtggttgcaatcacaatgaatggggatcagcatcatcctggcttggtcgggagttatccctgggtacacagccttcatgaaggcttcgtactgcttaaaagcttcctgggccttacttccctcggtgtagaacatcccacaggacttgctggaaaattgattagtagtacagttggcatcattcacacaacagcgggcatcgttgttggccaactgaaccacatttctgccccagcggttttgggtgatcttggctctgtctggattctccttcatagcgcgctgcccgttctcgctcgccacatccatctcgataatgtggtccttctggatcatgatagtgccatgcaggcatttcaccttgccttcataatcggtgcatccatgagcccacagagcgcacccggtgcactcccaattattgtgggcgatctcagaataataatgtaccaatccctgcatgaatcttcccatcattgttgtcaaggtcttcatgctggtaaatgtcagcgggatgccacggtgctcctcgttcacatactggtggcagatacgcttgtattgctcgtgctgctctggcatcagcttgaaagaggttctcagatcattatccagcctgtacctttccattagcacagccatcacttccatgcccttctcccaggcagataccaggggcagactcaaaggattcctaacagcaataaaagtagctcctttagctatagggtcattcttgtcgatcttctcaacacttctcttgccatccttctcaatgatgcgcaccggggggtagctgaagcccacggccaccaactgagcctgttctctttcttcttcactatcctggctgatgtcttgcagagggacatgcttggtcttcctgggcttcttcttgggagggatcgggggaggactgttgctccgctccggagacagggatgactgcgaagtttcgcttaccaataccacctggctctcggtagaagaaccggaccccacacgacggtaggtgttcctcttcgggggcagaggtggaggcgactgagatgggctgcggtctggccttggaggcggatggctggcagagctcattccgcgttcgggggtgtgctcccggtggcggtcgcttgactgatttcctccgcggctggccattgtgttctcctaggcagagaaacaacagacatggaaactcagccatcactgccaacatcgctgcaagcaccatcacacctcgcccccagcagcgacgaggaggagagcttaaccaccccaccacccagtcccgctaccaccacctctaccctcgatgatgaggaggaggtcgacgcagcccaggagatgcaggcgcaggataatgtgaaaacggaagagattgaggcagatgtcgagcaggacccgggctatgtgacgccggcggagcaccaggaggagctgaaacgctttctagacagagaggatgacgaccgcccagagcatcaagcagatggcgtttaccaggaggctgggatcagggatcatgtcgccgactacctcaccggccttggtggggaggacgtgctcctcaaacatctagcaaggcagtcgatcatagttaaagacgcattgctcgatctcactgaagtgcccatcagtgtggaagagcttagccgcgcctacgagctgaacctcttttcgcctcaggtaccccccaagcggcagccaaacggcacctgcgaggccaaccctcgactcaacttctatccagcttttactatccccgaagtgttggccacctaccacatctttttcaagaaccaaaagattccagtctcctgccgcgccaaccgcacccgcgccgatgccctgctcaacttgggtccgggagctcgcttacctgatatagcttccttggaagaggttccaaagatctttgagggtctgggaagtgatgagacacgggccgcaaatgctctgcaacagggagagaatgacatggatgaacaccacagcgctctggtggaactggagggtgacaatgcccggattgcagtgctcaagcgcagtatcgtggtcacccattttgcctaccccgctgttaacctgccccccaaagttatgagcgctgtcatggaccatctgctcatcaaacgagcaagacctctttcagaaaaccagaacatgcaggatccagacgcctcggacgagggcaagccggtagtcagtgacgagcagctatctcgctggctgggtaccaactccccccgagatttggaagagaggcgcaagcttatgatggctgtagtgctagtaactgtggagctggagtgtctgcgccgctttttcaccgaccctgagaccctgcgcaagctagaggagaacctgcactacacctttagacatggcttcgtgcggcaggcatgcaagatctccaacgtggagcttaccaacctggtttcttacatgggcattttgcatgagaaccgactagggcagagcgtcctgcacaccacccttaaaggggaggcccgccgtgactacatccgagactgtgtctacctctacctctgccatacctggcaaactggtatgggtgtgtggcaacagtgtttggaagagcagaacctaaaagagctggacaagctcttgcagagatccctcaaagccctgtggacaggttttgatgagcgcaccgtcgcctcggacctggcagacatcatcttccccgagcgtctcagggttactctgcgaaacggcctgccagactttatgagccagagcatgcttaacaactttcgctctttcatcctggaacgctccggtatcctgcctgccacctgctgtgcgctgccctccgactttgtgcctctcacctaccgcgagtgcccaccgccgctatggagccactgctacctgttccgcctggccaactacctctcctaccactcggatgttatagaggatgtgagcggagacggcctgctggaatgccactgccgctgcaatctttgcacaccccaccgctcccttgcctgcaacccccagttgctgagcgagacccagattatcggcaccttcgagctgcagggtcccagaagtaaaggcgaggggtcttctccggggcagagtttgaaactgacaccggggctgtggacctccgcctacctgcgcaagtttcaccccgaggactaccatccctatgagatcaggttctatgaggaccaatcacatcctcccaaagtcgagctctcagcctgcgtcatcacccagggagcaattctggcccaattgcaagccatccaaaaatctcgccaagaatttctgctaaaaaagggaaacggggtctaccttgaccctcagaccggtgaggagctcaacacaaggttcccccaggatgtcccatcgccgaggaagcaagaagttgaaggtgcagctgtcgcccccagaggatatgaaggaagactgggacagtcaggcagaggaggagatggaagattgggacagccaggcagaggaggtggacagcctggaggaagacagtttggaggaggaagacgaggaggcagaggaggtggaagaagcaaccgccgccaaacagttgtcatcggcggcggagacaagcaagtccccagacagcagcacggctaccatctccgctccgggtcggggggcccagcggcggcccaacagtagatgggacgagaccgggcgattcccaaacccgaccaccgcttccaagaccggtaagaaggagcgacagggatacaagtcctggcgtggacataaaaacgctatcatctcctgcttgcatgaatgcgggggcaacatatccttcacccggcgatacctgctcttccaccacggtgtaaacttcccccgcaatatcttgcattactaccgtcacctccacagcccctactgcagtcagcaagtcccggcaaccccgacagaaaaatacagcagcgacaacggtgaccagaaaaccagcagttagaaaatccacaacaagtgcaccaggaggaggactgaggatcacagcgaacgagccagcgcagaccagagagctgaggaaccggatctttccaaccctctatgccattttccagcagagtcgggggcaagagcaggaactgaaagtaaaaaaccgatctctgcgctcgctcaccagaagttgtttgtatcacaagagcgaagaccaacttcagcgcactctcgaggacgccgaggctctcttcaacaagtactgcgcgctgactcttaaagagtagcccttgcccgcgctcattttgaaaacggcgggaatcacgtcacccttggcacctgtcctttgcccttgtcatgagtaaagagattcccacgccttacatgtggagctatcagccccaaatggggttggcagcaggcgcttcccaggactactccacccgcatgaattggcttagcgccgggccctcaatgatatcacgggttaatgatatacgagcttatcgaaaccagttactcctagaacagtcagctctcaccaccacaccccgtcaacaccttaatccccgaaattggcccgccaccctggtgtaccaggaaaatcccgctcccaccaccgtactacttcctcgagacgcccaggccgaagttcagatgactaacgcaggtgtacagctggcgggcggttccgccctatgtcgtcaccgacctcaacagagtataaaacgcctggtgattagaggccgaggtatccagctcaacgacgagtcggttagctcttcgcttggtctgcgaccagacggagtcttccaaatcgccggctgtgggagatcttccttcactcctcgtcaggctgtgctgactttggagagttcgtcctcgcagccccgctcgggcggcattggaactctccagtttgtggaggagtttactccctctgtctacttcaaccccttctccggctctcctggccagtacccggacgagttcataccaaacttcgacgcaatcagcgagtcagtggatggctatgattgatgtctaatggtggtgcggctgagctagctcgactgcgacacctagaccactgccgccgctttcgctgcttcgcccgggaactcaccgagttcatctacttcgaactctccgaggagcaccctcagggtccggcccacggagtgcggattaccatcgaagggggaatagactctcgcctgcatcgcatcttctcccagcggcccgtgctaattgaacgcgaccagggaaatacaaccatctccatctactgcatctgtaaccaccccggattgcatgaaagcctttgctgtcttgtttgtgctgagtttaataaaaactgagttaagaccctcctacggactaccgcttcttcaatcaggactttacaacaccaaccagatcttccagaagacccagacccttcctcctttcatccaggactctaactctaccttaccagcaccctccactactaaccttcccgaaacaaacaagcttgcatctcatctgcaacaccgcctttcacgaagccttctttctgccaatactaccactcccaaaaccggaggtgagctccgcggtcttcctactgacgacccctgggtggtagcgggttttgtaacgttaggagtagttgcgggtgggcttgtgctgatcctttgctacctatacacaccttgctgtgcatatttagtcatattgtgctgttggtttaagaaatgggggccatactagtcgtgcttgctttactttcgcttttgggtctgggctctgctaatctcaatcctctcgatcacgatccatgtttagacttcgacccagaaaactgcacacttacttttgcacccgacacaagccgtctctgtggagttcttattaagtgcggatgggactgcaggtccgttgaaattacacataataacaaaacatggaacaataccttatccaccacatgggagccaggagttccccagtggtatactgtctctgtccgaggtcctgacggttccatccgcattagtaacaacactttcattttttctgaaatgtgcgatctggccatgttcatgagcagacagtatgacctatggcctcccagcaaagagaacattgtggcattttccattgcttattgcttggtaacatgcatcatcactgctatcatttgtgtgtgcatacacttgcttatagttattcgccctagacaaagcaatgaggaaaaagagaaaatgccttaacctttttcctcataccttttctttacagcatggcttctgttacagctctaattattgccagcattgtcactgtcgctcacgggcaaacaattgtccatattaccttaggacataatcacactcttgtagggcccccaattacttcagaggttatttggaccaaacttggaagtgttgattattttgatataatttgcaacaaaactaaaccaatatttgtaatctgtaacagacaaaatctcacgttaattaatgttagcaaaatttataacggttactattatggttatgacagatccagtagtcaatataaaaattacttagttcgcataactcagcccaaattaacagtgccaactatgacaataattaaaatggctaataaagcattagaaaattttacatcaccaacaacacccaatgaaaaaaacattccaaattcaatgattgcaattattgcggcggtggcattgggaatggcactaataataatatgcatgctcctatatgcttgttactataaaaagtttcaacataaacaggatccactactaaattttaacatttaattttttatacagatgatttccactacaatttttatcattactagccttgcagctgtaacttatggccgttcacacctaactgtacctgttggctcaacatgtacactacaaggaccccaagaaggctatgtcacttggtggagaatatatgataatggagggttcgctagaccatgtgatcagcctggtacaaaattttcatgcaacggaagagacttgaccattattaacataacatcaaatgagcaaggcttctattatggaaccaactataaaaatagtttagattacaacattattgtagtgccagccaccacttctgctccccgcaaatccactttctctagcagcagtgccaaagcaagcacaattcctaaaacagcttctgctatgttaaagcttccaaaaatcgctttaagtaattccacagccgctcccaatacaattcctaaatcaacaattggcatcattactgccgtggtagtgggattaatgattatatttttgtgtataatgtactacgcctgctgctatagaaaacatgaacaaaaaggtgatgcattactaaattttgatatttaattttttatagaattatgatattgtttcaatcaaataccactacctcctatgcatacacaaacattcagcctaaatacgctatgcaactagaaatcacaatactaattgtaattggaattcttatactatctgttattctttattttatattctgccgtcaaatacccaatgttcatagaaattctaaaagacgtcccatctattctcctatgattagtcgtccccatatggctctgaatgaaatctaagatctttttttttttctcttacagtatggtgaacatcaatcatgatccctagaaatttcttcttcaccatactcatctgtgcttttaatgtctgtgctactttcacagcagtagccactgcaagcccagactgtataggaccatttgcttcctatgcactttttgccttcgttacttgcatctgcgtgtgtagcatagtctgcctggttattaattttttccaactggtagactggatctttgtgcgaattgcctacctacgtcaccatcccgaataccgcaatcaaaatgttgcggcacttcttaggcttatttaaaaccatgcaggctatgctaccagtcattttaattttgctactaccctgcattcccctagcttccaccgccactcgcgctacacctgaacaacttagaaaatgcaaatttcaacaaccatggtcatttcttgattgctaccatgaaaaatctgattttcccacatactggatagtgattgttggaataattaacatactttcatgtacctttttctcaatcacaatataccccacatttaattttgggtggaattctcccaatgcactgggttacccacaagaaccagatgaacatattccactacaacacatacaacaaccactagcactggtacagtatgaaaatgagccacaaccttcactgccccctgccattagttacttcaacctaaccggcggagatgactgacccaatcgccacatcatccaccgctgccaaggagctgctggacatggacggacgtgcctcagaacagcgactcatccaactacgcattcgtcagcagcaggaacgagcagtaaaagagctaagggatgccattgggattcaccagtgcaaaaaaggcatattctgcttagtaaaacaatccaaaatctcctacgagatcaccgctactgaccatcgtctctcatacgagctcggtccgcagcgacaaaaattcacctgcatggtgggaatcaaccccatagttatcacccagcagtctggagatactaagggttgtatccagtgttcctgtgattccaccgagtgcatctacacactgctgaagaccctctgcggccttcgagacctcctacccatgaactaatcattgcccctaccttacccaatcaaaatattaataaagacacttacttgaaatcagcaatacagtctttgtcaaaactttctaccagcagcacctcaccctcttcccaactctggtactctaaacgtcggagggtggcatactttctccacactttgaaagggatgtcaaattttatttcctcttctttgcccacaatcttcatttctttatccccagatggccaagcgagctcggctaagcacttccttcaacccggtgtacccttatgaagatgaaagcagctcacaacacccatttataaatcctggtttcatttcccctgacgggttcacacaaagtccaaacggggttttaagtcttaaatgtgttaatccacttaccactgcaagcggctccctccaacttaaagtgggaagtggtcttacagtagacactactgatggatccttagaagaaaacatcaaagttaacacccccctaacaaagtcaaaccattctataaatttaccaataggaaacggtttgcaaatagaacaaaacaaactttgcagtaaactcggaaatggtcttacatttgactcttccaattctattgcactgaaaaataacactttatggacaggtccaaaaccagaagccaactgcataattgaatacgggaaacaaaacccagatagcaaactaactttaatccttgtaaaaaatggaggaattgttaatggatatgtaacgctaatgggagcctcagactacgttaacaccttatttaaaaacaaaaatgtctccattaatgtagaactatactttgatgccactggtcatatattaccagactcatcttctcttaaaacagatctagaactaaaatacaagcaaaccgctgactttagtgcaagaggttttatgccaagtactacagcgtatccatttgtccttcctaatgcgggaacacataatgaaaattatatttttggtcaatgctactacaaagcaagcgatggtgccctttttccgttggaagttactgttatgcttaataaacgcctgccagatagtcgcacatcctatgttatgacttttttatggtccttgaatgctggtctagctccagaaactactcaggcaaccctcataacctccccatttaccttttcctatattagagaagatgactgacaacaaaaataaagttcaacattttttattgaaattccttttacagtattcgagtagttattttgcctcccccttcccatttaacagaatacaccaatctctccccacgcacagctttaaacatttggataccattagagatagacatagttttagattccacattccaaacagtttcagagcgagccaatctggggtcagtaatacataaaaatgcatcgggatagtcttttaaagcgctttcacagtccaactgttgcggatgcgactccggagtctgaatcacggtcatctggaagaagaacgatgggaatcataatccgaaaacggaatcgggcgattgtgtctcatcaaacccacaagcaaccgctgtctgcgtcgctccgtgcgactgctgtttatgggatcggggtccgcagtgtcctgaagcatgattttaatagcccttaacattaactttctggtgcgatgcgcgcagcaacgcattctgatttcacttagattactacagtaggtacagcacattatcacaatattgtttaataaaccataattaaaagcgctccagccaaaactcatatctgatataatcgcccctgcatgaccatcataccaaagtttaatataaattaaatgtcgttccctcaaaaacacactacccacatacatgatctcttttggcatgtgcatattaacaatttgtctgtaccatggacaacgttggttaatcatgcaacccaatataaccttccggaaccacactgccaacaccgctcccccagccatgcattgaagtgaaccctgctgattacaatgacaatgaagaacccaattctctcgaccatgaatcacttgagactgaaaaatatctatagtagcacaacaaagacataaatgcatgcatcttctcataatttttaactcctctggatttaaaaacatatcccaaggaatgggaaactcttgcagaacagtaaagctggcagaacaaggaagaccacgaacacaacttacactatgcatagtcatagtatcacaatctggcaacagcgggtggtcttcagtcatagaagctcgggtttcattttcctcacatcgtggtaattgggctctggtgtaagggtgatgtctggcgcatgatgtggagcgtgcgcgcaaccttgtcataatggagttgcttcctgacattctcgtattttgtatagcaaaacgctgccctggcacaacacactcttcttcgtcttctatcctgccgcttagtgtgttccgtctgataattcaagtacagccacactcttaagttggtcaaaagaatgctggcttcagttgtaatcaaaactccatcatatttaattgttctaaggaaatcatccacggtagcatatgcaaatcccaaccaagcaatgcaactggattgcgtttcaagcagcagaggagagggaagagacggaagaatcatgttaatttttattccaaacgatctcgcagtacttcaaattgtagatcgcgcagatggcatctatcgcccccactgtgttggtgaaaaagcacagctaaatcaaaagaaatgcgattttcaaggtgctcaacggtggcttccaacaaagcctccacgcgcacatccaaaaacaaaagaataccaaaagaaggagcattttctaactcctcaaacatcatattacattcctgcaccattcccagataattttcagctttccagccttgaattattcgtgtcagttcttgtggtaaatccaaaccacacattacaaacaggtcccggagggcgccctccaccaccattcttaaacacaccctcataatgacaaaatatcttgctcctgtgtcacctgtagcaaattaagaatggcatcatcaattgacatgcccttggctctaagttcttctctaagttctagttgtagatactctctcatattatcaccaaactgcttagccagaagccccccgggaacaatagcaggggacgctacagtgcagtacaagcgcagacctccccaattggctccagcaaaaacaagattagaataagcatactgggaaccaccagtaatatcatcaaagttgctggaaatataatcaggcagagtttcttgtaaaaattgaataaaagaaaaattttccaaagaaacattcaaaaccgttgggatgcaaatacaataggttaccgcgctgcgctccaacattgttagttttgaattagtctgcaaaataaaagaaacaagcgtcatatcatagtagcctgtcgaacaggtggaaaaatcagtctttccatcacaagacaagccacagggtctccagctcgaccctcgtaaaacctgtcattgtgattaaacaacagcaccgaaagttcctcgcggtggccagcatgaataattcttgatgaagcatacaatccagacatgttagcatcagttaaagagaaaaaacagccaacatagcctctgggtataattatgcttaattttaagtatagcaaagccacccctcgcggatacaaagtaaaaggcacaggagaataaaaaatataattatttctctgctgctgttcaggcaacgttgctcccggtccctctaaatagacatacaaagcctcatcagccatggcttaccaggcaaagtacagcgggcgcacaaagcacaagctctaaagaagctctaaaaacactctccaacctctccacaatatatacacaagccctaaactgacgtaatgggagtaaagtgaaaaaaaaataccgccaagcccaacacacaccccgaaactgcgtcagcaggaaaaagtacagtttcacttccgcattcccaacaagcgtaacttcctctttctcatggtacgtcacatccgattaacttgcaacgtcattttcccacggtcgcgccgccccttttagccgttaaccccgcagccaatcaccacacagcgcgcacttttttaaattacctcatttacatgttggcaccattccatctataaggtatattatatagatag

SEQ ID NO: 146 - DNA, 35514 bp, Unknown
  Description of Unknown: Human adenovirus 7 sequence
ctctctatttaatataccttatagatggaatggtgccaatatgtaaatgaggtaatttaaaaaagtgcgcgctgtgtggtgattggctgtggggttaacggctaaaatgggcggggcggccgtgggaaaatgacgtgacttatgtgggaggagctatgttgcaagttattgcggtaaatgtgacgtaaaacgaggtgtggtttgaacacggaagtagacagttttcccacgcttactgacaggatatgaggtagttttgggcggatgcaagtaaaaattctccattttcgcgcgaaaactgaatgaggaagtgaatttctgagtcatttcgcggttatgacagggtggagtatttgccgagggccgagtagactttgaccgtttacgtggaggtttcgattaccgtgtttttcacctaaatttccgcgtacggtgtcaaagtcctgtgtttttacgtaggtgtcagctgatcgctagggtatttaaacctgacgagttccgtcaagaggccactcttgagtgccagcgagaagagttttctccttcgcgccgcaagtcagttctgcgctttgaaaatgagacacctgcgtttcctgccacaggagattatcttcagtgagaccgggatcgaaatactggagtttgtggtaaataccctaatgggagacgacccggaaccgccagtgcagcctttcgatccacctacgctgcacgatctgtatgatttagaggtagacgggcctcaggatcccaatgaggaagctgtgaatgggttttttactgattctatgctgctagctgccgatgaaggattggacataaaccctcctcctgagacccttgttaccccaggggtggttgtggaaagcggcagaggtgggaaaaaattgcctgatctgggagcagctgaaatggacttgcgttgttatgaagagggttttcctccgagtgatgatgaagatggggaaactgagcagtccatccataccgcagtgaatgagggagtaaaagctgccagcgatgtttttaagttggactgtccggagctgcctggacatggctgtaagtcttgtgaatttcacaggaataacactggaatgaaagaactattgtgctcgctttgctatatgagaatgcactgccactttatttacagtaagtgtatttaagtgaaatttaaaggaatagtgtagctgtttaataactgttgaatggtagatttatgttttttacttgtgattttttgtaggtcctgtgtctgatgatgagtcaccttctcctgattcaactacctcacctcctgaaattcaggcgcccgcacctgcaaacgtatgcaagcccattcctgtaaagcctaagcctgggaaacgccctgctgtggataagcttgaggacttgttggagggtggggatggacctttggaccttagtacccggaaactgccaaggcaataagtgccctgcagctgtgtttatttaatgtgacgtcatgtaataaaattatgtcagctgctgagtgttttattacttcttgggtggggacttggatatataagtaggagcagatctgtgtggttagctcacagcaacctgctgccatccatggaggtttgggctatcttggaagacctcagacagactaggctactgctagaaaacgcctcggacggagtctctggcctttggagattctggttcggtggtgatctagctaggctagtgtttaggataaaacaggactacagcgtagaatttgaaaagttattggacgacagtccaggactttttgaagctcttaacttgggtcatcaggctcattttaaggagaaggttttatcagttttagatttttctactcctggtagaactgctgctgctgtagcttttcttacttttatattggataaatggatccgccaaactcacttcagcaagggatacgttttggatttcatagcagcagctttgtggagaacatggaaggctcgcaggatgaggacaatcttagattactggccagtgcagcctctaggagtagcagggatactgagacacccaccgaccatgccagcggttctgcaggaggagcagcaggaggacaatccgagagccggcctggaccctccggtggaggagtagctgacctgtttcctgaactgcgacgggtgcttactaggtctacgaccagtggacagaacagaggcattaagagggagaggaatcctagtgggaataattcaagaaccgagttggctttaagtttaatgagccgcaggcgtcctgaaactgtttggtggcatgaggttcagagcgaaggcagggatgaagtttcaatattgcaggagaaatattcactagaacaacttaagacctgttggttggaacctgaggatgattgggaggtggccattaggaattatgctaagatatctctgaggcctgataaacaatatagaattactaagaagattaatattagaaatgcatgctacatatcagggaatggggcagaggttataatagatacacaagataaagcagcttttagatgttgtatgatgggtatgtggccaggggttgtcggcatggaagcagtaacacttatgaatattaggtttagaggggatgggtataatggcattgtatttatggctaacactaagctgattctacatggttgtagcttttttgggtttaataatacgtgtgtagaagcttgggggcaagttagtgtgaggggttgtagtttttatgcatgctggattgcaacatcaggtagggtcaagagtcagttgtctgtgaagaaatgcatgtttgagagatgtaatcttggcatactgaatgaaggtgaagcaaggatccgccactgcgcagctacagaaactggctgcttcattctaataaagggaaatgccagtgtgaagcataatatgatctgtggacattcggatgagaggccttatcagatgctgacctgcgctggtggacattgcaatattcttgctactgtgcatatcgtttcacatgcacgcaagaaatggcctgtatttgaacataatgtgattaccaagtgcaccatgcacataggtggtcgcaggggaatgtttatgccttaccagtgtaacatgaatcatgtgaaggtaatgttggaaccagatgccttttccagagtgagcttaacaggaatctttgatatgaatattcaactatggaagatcctgagatatgatgacactaaaccgagggtgcgcgcatgcgaatgcggaggcaagcatgctagattccagccggtgtgcgtggatgtgactgaagacctgagacccgatcatttggtgcttgcctgcactggagcggagttcggttccagtggtgaagaaactgactaaagtgagtagtgggggcaagatgtggatggggactttcaggttggtaaggtggacagattgggtaaattttgttaatttctgtcttgcagctgccatgagtggaagcgcttcttttgaggggggagtatttagcccttatctgacgggcaggctcccaccatgggcaggagttcgtcagaatgtcatgggatccactgtggatgggagacccgtccagcccgccaattcctcaacgctgacctatgccactttgagttcgtcaccattggatgcagctgcagccgccgccgctactgctgccgccaacactatccttggaatgggctattacggaagcatcgttgccaattccagttcctctaataacccttcaaccctggctgaggacaagctacttgttctgttggctcagctcgaggccttaacccaacgcttaggcgaactgtctaagcaggtggcccagttgcgtgagcaaactgagtctgctgttgctacagcaaagtctaaataaagatctcaaatcaataaataaagaaatacttgttataaaaacaaatgaatgtttatttgatttttcgcgcgcggtatgccctggaccatcggtctcgatcattgagaactcggtggatcttttccagtaccctgtaaaggtgggattgaatgtttagatacataggcattagtccgtctcgggggtggagatagctccattgaagagcctcttgctccggggtagtgttataaatcacccagtcatagcaaggtcggagtgcatggtgttgcacaatatcttttaggagcagactaattgcaacggggaggcccttagtgtaggtgtttacaaatctattgagctgggacgggtacatccggggtgaaattatatgcattttggactggatcttgaggttggcaatgttgccgcctagatcccgtctcgggttcatattgtgcaggaccactaagacagtgtatccggtgcacttgggaaatttatcatgcagcttagagggaaaagcatgaaaaaatttggagacgcctttgtgaccccccagattctccatgcactcatccataatgatagcgatggggccgtgggcagcggcacgggcgaacacgttccgggggtctgaaacatcatagttatgctcctgagtcaggtcatcataagccattttaataaactttgggcggagggtgccagattgggggatgaaagttccctctggcccgggagcatagttcccctcacatatttgcatttcccaggctttcagttcagagggggggatcatgtccacctgcggggctataaaaaataccgtttctggagccggggtgattaactgggatgagagcaaattcctaagcagctgagacttgccgcacccagtgggaccgtaaatgaccccaattacgggttgcagatggtagtttagggagcgacagctgccgtcctcccggagtaggggggccacttcgttcatcatttcccttacatggatattttcccgcaccaagtccgttaggaggcgctctcccccaagggatagaagctcctggagcgaggagaagtttttcagcggcttcagcccgtcagccatgggcattttggaaagagtctgttgcaagagctcgagccggtcccagagctcggtgatgtgctctatggcatctcgatccagcagacctcctcgtttcgcgggttgggacggctcctggagtagggaatcagacgatgggcgtccagcgctgccagggtccgatccttccatggtcgcagcgtccgagtcagggttgtttccgtcacggtgaatgggtgcgcgcctggttgggcgcttgcgagggtgcgcttcagactcatcctgctggtcgagaaccgctgccgatcggcgccctgcatgtcggccaggtagcagtttaccatgagttcgtagttgagcgcctcggccgcgtggcctttggcacggagcttacctttggaagttttatggcaggcggggcagtagatacatttgagggcatacagcttgggcgcgaggaaaatggattcgggggagtatgcatccgcaccgcaggaggcgcagacggtttcgcactccacgagccaggtcagatccggctcatcggggtcaaaaacaagttttccgccatgttttttgatgcgtttcttacctttggtttccatgaggtcgtgtccccgctgggtgacaaagaggctgtccgtgtccccgtagaccgactttatgggcctgtcctcgagcggagtgcctcggtcctcttcgtagaggaacccagcccactctgatacaaaagcgcgtgtccaggccagcacaaaggaggccacgtgggaggggtagcggtcgttgtcaaccagggggtccaccttctctacggtatgtaaacacatgtccccctcctccacatccaagaatgtgattggcttgtaagtgtaggccacgtgaccaggggtccccgccgggggggtataaaagggggcgggcctctgttcgtcctcactgtcttccggatcgctgtccaggagcgccagctgttggggtaggtattccctctcgaaggcgggcatgacctctgcactcaggttgtcagtttctaggaacgaggaggatttgatattgacagtaccagcagagatgcctttcataagactctcgtccatctggtcagaaaacacaatcttcttgttgtccagcttggtagcaaatgatccatagagggcattggatagaagcttggcgatggagcgcatggtttggttcttttccttgtccgcgcgctccttggcggcgatgttaagctggacgtactcgcgcgccacacatttccattcagggaagatggttgtcagttcatccggaactattctgactcgccatcccctattgtgcagggttatcagatccacactggtggccacctcgcctcggaggggctcattggtccagcagagtcgacctccttttcttgaacagaaaggggggagggggtctagcatgagctcatcaggggggtccgcatctatggtaaatattcccggtagcaaatctttgtcaaaatagctgatggtggtgggatcatccaaggtcatctgccattctcgaactgccagcgcgcgctcataggggttaagaggggtgccccagggcatggggtgggtgagcgcggaggcatacatgccacagatatcgtatacatagaggggctcttcgaggatgccgatgtaagtgggataacagcgcccccctctgatgcttgctcgcacatagtcatagagttcatgtgagggggcgagaagacccgggcccagattggtgcggttgggtttttccgccctgtaaacgatctggcgaaagatggcatgggaatttgaagagatagtaggtctctggaatatgttaaaatgggcatgaggtaggcctacagagtcccttatgaagtgggcatatgactcttgcagcttggctaccagctcggcggtgacgagtacatccagggcacagtagtcgagagtttcctggatgatgtcataacgcggttggcttttcttttcccacagctcgcggttgagaaggtattcttcgcgatccttccagtactcttcgaggggaaacccgtctttttctgcacggtaagagcccaacatgtagaactgattgactgccttgtagggacagcatcccttctccactgggagagagtatgcttgggctgcattgcgcagcgaggtatgagtgagggcaaaagtgtccctgaccatgactttgaggaattgatacttgaagtccatgtcatcacaggccccctgttcccagagttggaagtccacccgcttcttgtaggcggggttgggcaaagcgaaagtaacatcattgaagaggatcttgccggccctgggcatgaaatttcgggtgattctgaaaggctgagggacctctgctcggttattgataacctgagcggccaagacgatctcatcaaagccattgatgttgtgccccactatgtacagttctaagaatcgaggggtgcccctgacatgaggcagcttcttgagttcttcaaaagtgagatctgtagggtcagtgagagcatagtgttcgagggcccattcgtgcacgtgagggttcgctttgaggaaggaggaccagaggtccactgcgagtgctgtttgtaactggtcccggtattgacgaaaatgctgcccgactgccattttttctggggtgacgcaatagaaggtttgggggtcctgccgccagcgatcccacttaagtttcatggcgaggtcataggcgatgttgacgagccgctggtctccagagagtttcatgaccagcatgaaggggattagctgcttgccaaaggaccccatccaggtgtaggtttccacatcgtaggtgaggaagagcctttctgtgcgaggatgagagccaatcgggaagaactggatctcctgccaccagttggaggaatggctgttgatgtgatggaagtagaactccctgcgacgcgccgagcattcatgcttgtgcttgtacagacggccgcagtactcgcagcgattcacgggatgcacctcatgaatgagttgtacctgacttcctttgacgagaaatttcagtggaaaattgaggcctggcgtttgtacctggcgctctactatgttgtctgcatcggcatgaccatcttctgtctcgatggtggtcatgctgacgagccctcgcgggaggcaagtccagacctcggcgcggcaggggcggagctcgaggacgagagcgcgcaggccggagctgtccagggtcctgagacgctgcggagtcaggttagtaggcagtgtcaggagattgacttgcatgatcttttcgagggcgtgagggaggttcagatggtacttgatctccacgggtccgttggtggagatgtcaatggcttgcagggttccgtgccccttgggcgctaccaccgtgcccttgtttttccttttgggcggcggtggctctgttgcttcttgcatgtttaggagcggtgtcgagggcgcgcaccgggcggcaggggcggctcgggacccggcggcatggctggcagtggtacgtcggcgccgcgcgcgggtaggttctggtactgcgccctgagaagactcgcatgtgcgacgacgcggcggttgacatcctggatctgacgcctctgggtgaaagctaccggccccgtgagcttgaacctgaaagagagttcaacagaatcaatctcggtatcgttgacggcggcttgcctaaggatttcttgcacgtcgccagagttatcctggtaggcgatctcggccatgaactgctggatctcttcctcttgaagatctccgcggcccgctctctcgacggtggccgctaggtcgttggagatgcgcccaatgagttgagagaatgcattcatgcccgcctcgttccagacgcggctgtagaccacagcccccacgggatctctcgcgcgcataaccacctgggcgaggttaagctctacgtggcgggtgaagaccgcatagttgcataggcgctggaaaaggtagttgagtgtggtggcgatgtgctcggtgacgaagaaatacatgatccatcgtctcagcggcatctcgctgacatcgcccagcgcttccaagcgctccatggcctcgtagaagtccacggcaaagttgaaaaactgggagttacgcgcggacacggtcaactcctcttccagaagacggatgagttcggcaatggtggtgcgcacctcgcgctcgaaatcccccgggatttcttcctcaatctcttcttcttccactaacatctcttcctcttcaggtggggctgcaggaggagggggaacgcggcgacgccggcggcgcacgggcagacggtcgatgaatctttcaatgacctctccgcggcggcggcgcatggtctcggtgacggcacgaccgttctccctgggtctcagagtgaagacgcctccgcgcatctccctgaagtggtgactgggaggctctccgttgggcagggacaccgcgctgattatgcattttatcaattgccccgtaggtactccgcgcaaggacctgatcgtctcaagatccacgggatctgaaaacctttcgacgaaagcgtctaaccagtcgcaatcgcaaggtaggctgagcactgtttcttgcgggcgggggcggctagacgctcggtcggggttctctctttcttttccttcctcctcttgggaggatgagacgatgctgctggtgatgaaattaaaataggcagttttgagacggcggatggtggcgaggagcaccaggtctttgggtccggcttgttggatgcgcaggcgatgggccattccccaagcattatcctgacatctggccagatctttatagtagtcttgcatgagtcgttccacgggcacttcttcttcgcccgctctgccatgcatgcgagtgatcccgaacccgcgcatgggctggacaagtgccaggtccgctacaaccctttcggcgaggatggcttgctgcacctgggtgagggtggcttggaagtcgtcaaagtccacaaagcggtggtaggccccggtgttgattgtgtaggagcagttggccatgactgaccagttgactgtctggtgcccagggcgcacgagctcggtgtacttgaggcgcgagtatgcgcgggtgtcaaagatgtaatcgttgcaggtgcgcaccaggtactggtagccgatgagaaagtgtggcggtggctggcggtacaggggccatcgctctgtagccggggctccgggggcaaggtcttccagcatgaggcggtggtaaccgtagatgtacctggacatccaggtgataccggaggcggtggtggatgcccgcgggaactcgcgtacgcggttccagatgttgcgcagcggcatgaagtagttcatggtaggcacggtttggcccgtgagacgtgcacagtcgttgatgctctagacatacgggcaaaaacgaaagcggtcagcggctcgtctccgtggcctggaggctaagcgaacgggttgggctgcgcgtgtaccccggttcgaatctcggatcaggctggagccgcagctaacgtggtactggcactcccgtctcgacccaggcctgcacaaaacctccaggatacggaggcgggtcgtttttttgctttttcctggatgggagccagtgctgcgtcaagctttagaacactcagttctcggggctgggagtggctcgcgcccgtagtctggagaattaatcgccagggttgcgttgcggtgtgccccggttcgagtcttagcgcgccggatcggccggtttccgcgacgtttctaagaccccgccagccgacttctccagtttacgggagcgagccctcttttttttttttgttttttgttgcccagatgcatcccgtgctgcgacagatgcgcccccagcaacagcccccttctcagcagcagctacaacaacagccacaaaaggctcttcctgctcctgtaactactgcggctgcagccgtcagcggcgcgggacagcccgcctatgatctggaattggaagagggcgagggactggcgcgcctgggcgcaccatcgcccgagcggcacccgcccagccgacttctccagtttacgggagcgagccctcttttttttttttgttttttgttgcccagatgcatcccgtgctgcgacagatgcgcccccagcaacagcccccttctcagcagcagctacaacaacagccacaaaaggctcttcctgctcctgtaactactgcggctgcagccgtcagcggcgcgggacagcccgcctatgatctggaattggaagagggcgagggactggcgcgcctgggcgcaccatcgcccgagcggcacccgcgggtgcaactgaaaaaggactctcgcgaggcgtacgtgccccagcagaacctgttcagggacaggagcggtgaggagccagaggagatgcgagcatctcgatttaacgcgggtcgcgagctgcgccacggtctggatcgaagacgggtgctgcaagacgaggattttgaggtcgatgaagtgacagggatcagcccagctagggcacatgtggccgcggccaacctagtctcagcctacgagcagaccgtgaaggaggagcgcaacttccaaaaatcttttaacaaccatgtgcgcaccctgatcgcccgcgaggaagtgaccctgggtctgatgcatctgtgggacctgatggaggctatcacccagaaccccactagcaaaccactgacagctcagctgtttctggtggttcaacatagcagggacaacgaggcattcagggaggcgttgttgaacatcaccgagcctgatgggagatggctgtatgatctgatcaacatcctgcaaagtattatagtgcaggaacgtagcctgggtttggctgagaaagtggcagctatcaactactcggtcttgagcctgggcaaatactacgctcgcaagatctacaagaccccctacgtacccatagataaggaggtaaagatagatgggttttacatgcgcatgactctgaaggtgctgactctgagcgacgatctgggggtgtatcgcaatgacaggatgcaccgcgcggtgagcgccagcaggaggcgcgagctgagcgacagagaacttatgcacagcttgcaaagagctctaacgggggccgggactgatggggagaactactttgacatgggagcggacttgcaatggcaacccagtcgcagggccatggaggctgcagggtgtgagcttccttacatagaagaggtggatgaagtcgaggacgaggagggcgagtacttggaagactgatggcgcgacccgtatttttgctagatggaacagcagcaggcaccggaccccgcaatgcgggcggcgctgcagagccagccgtccggcattaactcttcggacgattggacccaggccatgcaacgcataatggcgctgacgacccgcaaccccgaagcctttagacagcaaccccaggccaaccgcctttcggccatactggaggccgtagtgccctcccgctccaaccccacccacgagaaggtcctggctatcgtgaacgcgctggtggagaacaaggccatccgtcccgatgaggccgggctggtatacaatgctctcttggagcgcgtggcccgttacaacagcagcaacgtgcaaaccaacctggacaggatggtgaccgatgtgcgcgaggccgtgtctcagcgcgagcggttccagcgcggcgccaacttggggtcgttggtagcgctaaacgctttcctcagcacccagcccgccaacgtgccccgtggtcagcaagactatacaaactttttgagtgcattgagactcatggtagctgaggtgccccagagcgaggtgtaccagtccgggccagattacttcttccagaccagcagacagggcttgcagacagtgaacctgactcaggctttcaagaacctgaagggtctgtggggagtgcacgccccagtaggagatcgcgcgaccgtgtctagcttgctgactcccaactcccgcctgctgctgctgctggtatccccctttactgacagcggtagcatcgaccgcaactcgtacttgggctacctgcttaacctgtatcgcgaggccatagggcagagccaggtggacgagcagacctatcaagaaatcacccaagtgagccgcgccctgggtcaggaagacacgggcagtttggaagccaccctgaacttcttgctaaccaaccggtcgcagaagatccctcctcagtatgcgcttaccgctgaggaggagcggatcctcagatacgtgcaacagagcgttggactgtttctgatgcaggagggggcgacacctaccgccgcgctggacatgacagctcgaaacatggagcccagcatgtatgctagtaacaggcctttcattaacaaactgctggactacctgcacagggcggccgccatgaactctgattatttcaccaatgctatcctgaacccacactggctgcccccacctggtttctacactggcgagtacgacatgcccgaccccaatgacgggttcctgtgggacgatgtggacagcagcatattctccccgcctcccggttatacagtttggaagaaggaagggggcgatagaagacactcttccgtgtcgctgtccggaacggctggtgctgccgcgaccgtgcccgaagctgcaagtcctttccctagcttgcccttttcactaaacagcgttcgcagcagtgaactggggagaataacccgcccgcgcttgatgggcgaggatgagtacttgaatgactctttgctgaggccagagagggaaaagaacttccccaacaatggaatagagagtctggtggataagatgagtagatggaagacctatgcgcaggatcacagagacgagcccaggatattgggggctacaagcagaccgacccgtagacgccagcgccacgacagacagatgggtcttgtgtgggacgatgaggactctgccgatgatagcagcgtgttggacttgggtggaagaggagggggcaacccgttcgctcatctgcgtcccagattcgggcgcatgttgtaaaagtgaaagtaaaataaaaatgcaactcaccaaggccatggcgaccgagcgtgcgttcgttcttttttgttatctgtgtctagtacgatgaggagacgagccgtgctaggcggagcggtggtgtatccggagggtcctcctccttcttacgagagcgtgatgcagcaacaggcggcgatgatacagcccccactggaggttcccttcgtacccccgcggtacctggcgcctacggaagggagaaacagcattcgttactcggagctgtcgcccctgtacgataccaccaagttgtatctggttgacaacaagtcggcggacatcgcctccctgaactatcagaacgaccacagcaacttcctgaccacggtggtgcagaacaatgactttacccccacggaggctagcacccagaccatcaactttgacgaacggtcgcgatggggcggtcatctgaagaccatcatgcacaccaacatgcccaacgtgaacgagtacatgttcagcaacaagttcaaggcgagggtgatggtgtccagaaaagctcctgaaggtgttacagtaaatgacacctatgatcataaagaggatatcttgaagtatgagtggtttgagttcattttaccagaaggcaacttttcagccaccatgacgatcgacctgatgaacaatgccatcattgacaactacctggaaattggcagacagaatggagtgctggaaagtgacattggtgttaagtttgacactagaaatttcaggctcgggtgggaccccgaaactaagttgattatgccaggagtctacacttatgaggcattccatcctgacattgtattgctgcctggttgcggggtagactttactgaaagccgacttagcaacttgcttggcatcaggaagagacatccattccaggagggtttcaaaatcatgtatgaagatcttgaagggggtaatattcctgcccttttggatgtcactgcctatgaggaaagcaaaaaggataccactactgaaacaaccacactggctgttgcagaggaaactagtgaagatgataatataactagaggagatacctatataacagaaaaacacaaacgtgaagctgcagctgctgaagttaaaaaagagttaaagatccaacctctagaaaaagacagcaagagtagaagctacaatgtcttggaagacaaaatcaacacggcctaccgcagttggtacctgtcctacaattacggtaaccctaagaaaggaataaggtcttggacactgctcaccacttcagatgtcacctgtggggcagagcaggtttactggtcgctccctgacatgatgcaagacccagtcacgttccgctccacaagacaagtcaacaactacccagtggtgggtgcagagcttatgcccgtcttctcaaagagtttctacaatgagcaagccgtgtactctcagcagctccgacaggccacttcgctcacgcacgtcttcaaccgcttccctgagaaccagatcctcatccgcccgccggcgcccacaattaccaccgtcagtgaaaacgttcctgctctcacagatcacgggaccctgccgttacgcagcagtatccggggagtccagcgcgtgaccgttactgacgccagacgccgcacctgtccctacgtttacaaggccctgggcatagtcgcgccgcgcgttctttcaagccgcactttctaaaaaaaaaaaatgtccattctcatctcgcccagtaataataccggttggggactgtatgcgcccaccaagatgtatggaggcgcccgcaaacgctctacccagcaccctgtgcgcgttcgcggtcatttccgcgctccctggggcgcactcaagggtcgtacccgcactcggaccacggtcgatgatgtgatcgaccaggtggtcgccgatgctcgtaattatactcctactgcgcctacatctactgtggatgcagttattgacagtgtggtggcagacgcccgcgcctatgctcgccggaagagccgaaggaggcgcatcgccaggcgccacagggctactcccgccatgcgagctgcaaaagctattctgcggagggccaaacgtgtggggcgaagagccatgcttagagcggccagacgcgcggcttcaggtgccagcagcggcaggtcccgcaggcgcgcggccacggcggcagcagcggccattgccaacatggcccaaccgcgaagaggcaatgtgtactgggtgcgtgatgccactaccggccagcgcgtgcccgtgcgcactcgcccccctcgcacttagaagatactgagcagtctccgatgttgtgtcccagcggcaagtatgtccaagcgcaaatacaaggaagagatgctccaggtcatcgcgcctgaaatctacggtccaccggtgaaggatgaaaaaaagccccgcaaaatcaagcgggtcaaaaataacaaaaaggaagaagatgacgatgatgggctggtggagtttgtgcgcgagttcgccccaagacggcgcgtgcagtggcgcgggcgcaaagtgcgtcaagtgctcagacccgggaccactgtggtttttacacccggcgagcgttccagcactacttttaaacggtcctatgatgaggtgtacggggatgacaatattcttgagcaggcggcagaccgccttgacgagtttgcttatggcaagcgcactagatccagtcccaaagaggaggcggtgtccattcctttggatcatggaaatcccacccccagcctcaaaccagtcaccctgcagcaagtgctgcccgtgcctgcgcggagaggcgtaaagcgcgagggtgaggacctgtatcccaccatgcagctaatggtgcccaagcgccagaggctagaagacgtactggagaaaatgaaagtggatgccgatatccagcctgaggtcaaagtaagacctatcaaggaagtggcgccaggtttgggagtacaaaccttcgacatcaagattcccaccgagtccatggaagtgcagaccgaacctgcaaaacccacaaccacctcaattgaggtgcaaacggaaccctggatgcccgcgcccgttgccgcccccagcaccactcgaagatcacgacgaaagtacggcccagcaagtctgctaatgcccaactatgctctgcacccatccatcattcccactccgggttacagaggcactcgctactatcgaaaccggagcaacacctctcgccgccgcaaaccacctgcaagtcgcactcgccgtcgccgccgccgcaacactgccagcaaattgactcccgccgccctggtgcggagagtgtaccgcgatggtcgcgctgaacctctgacgctgccgcgcgcgcgctaccatccaagcatcaccacttaatgactgttgacgctgcctccttgcagatatggccctcacttgccgccttcgcgtccccattactggctaccgaggaagaaactcgcgccgtagaaggatgttggggcgagggatgcgccgccacagacgaaggcgcgctatcagcagacgattagggggtggctttttgccagctcttatacccatcatcgccgcagcgatcggggcgataccaggcatagcttccgtggcggttcaggcctcgcagcgccactaacattggaaaaacttataaataaaaaatagaatggactctgacgctcctggtcctgtgactatgtttttgtagagatggaagacatcaatttttcatccctggctccgcgacacggcacgaggccgtacatgggcacctggagcgacatcggcacgagccaactgaacgggggcgccttcaattggagcagtatctggagcgggcttaaaaattttggctcgaccgtaaaaacctatgggaacaaagcttggaacagcagcacagggcaggctctgagaaataagcttaaggaacaaaacttccaacagaaggtggtcgatgggatcgcctctggtattaacggcgtagtggatctggccaaccaggctgtacaaaaacagataaacagccgcctggacccgccgcccgcaacccctggtgaaatggaagtggaggaagaacttcctccgctggaaaagcggggcgacaagcgtccgcgacccgagctagagcacacgctggtgacgcgcgcagacgagcccccttcatacgaggaggcagtaaagctcggaatgcccactaccaggcccgtagctcacatggctaccggggtgatgaaaccttctgagttacatcgacccgccaccttggacttgcctcctccccctgcttctgcggcgcctgttcccaaacctgtcgctaccagaaagcccaccgccgtacagcccgttgccgtagccagaccgcgtcctgggggcacaccgcgcccgaaagcaaactggcaaagtactctgaacagcatcgtgggtctgggcgtgcagagtgtaaagcgccgtcgctgctattaattaaatatggagtagcgcttaacttgcttgtctgtgtgtatgtatcatcaccacgccgccgcagcagaggagaaaggaagaggtcgcgcgccgaggctgagttgctttcaagatggccaccccatcgatgatgccccaatgggcatacatgcacatcgccggacaggatgcttcggagtacctgagtccgggtctggtgcagttcgcccgtgcaacagacacctacttcagtatggggaacaagtttagaaaccccacagtggcgcccacccacgatgtgaccaccgaccgtagccagcgactgatgctgcgcttcgtgcccgttgaccgggaggacaatacatactcttacaaagtgcggtacaccctcgccgtgggcgacaacagagtgcttgacatggccagcacattctttgacattaggggggtgcttgatagaggtcctagcttcaagccatattccggcacagcttacaattcactggctcctaagggcgcgcctaacacatctcagtggatagttacaacgggagaagacaatgccaccacatacacatttggcattgcttccacgaagggagacaatattactaaggaaggtttagaaattgggaaagacattactgcagacaacaagcccatttatgccgataaaacatatcagccagagcctcaagttggagaagaatcatggactgatattgatggaacaaatgaaaaatttggaggtagagctcttaaaccagctactaaaatgaagccatgctacgggtcttttgcaagacctacaaacataaaagggggccaagctaaaaacagaaaagtaacaccaaccgaaggagatgttgaagctgaggagccagatattgatatggaatttttcgatggtagagaagctgctgacgctttttcgcctgaaattgtgctttacacggaaaatgtcaatttggaaactccagacagccatgtggtatacaagccaggaacttctgatggtaactctcatgcaaatttgggtcaacaagccatgcctaacagacccaattacattggcttcagggataactttgtaggtcttatgtactacaacagtactggaaatatgggagttttggccggccaagcatcacaactgaatgcagtggttgacttgcaggacagaaacactgaactgtcatatcagcttttgcttgattctctgggagacagaagcagatacttcagcatgtggaatcaggctgtggacagctatgatcccgatgttcgtattattgaaaatcatggcgtcgaggatgaactgcctaattactgttttcctctggatggcataggaccagggaacaaatatcaaggcattaaacctagagacactgcatgggaaaaagatactaaagtttctacagctaatgaaatagccataggcaacaatctggctatggaaattaatatccaagctaatctttggagaagttttctgtactccaatgtggctttgtaccttccagatgtttacaagtacacgccaactaacattactctgcccgctaacaccaacacctatgagtacatgaacgggcgagtggtttccccatctctggtcgattcatacatcaacattggcgccaggtggtctcttgacccaatggacaatgtgaatccatttaaccaccaccgcaatgctggcctacgctaccggtccatgcttctgggcaatggccgttatgtgcctttccacatacaagtgcctcaaaaattctttgctgtcaagaacctacttcttctacctggctcctacacctatgagtggaacttcagaaaggatgtgaacatggtcctgcaaagttcccttggaaatgacctcagaacagatggtgctaacataagtttcaccagcatcaacctctatgccaccttcttccccatggctcacaacaccgcttcaactcttgaagccatgctgcgcaacgataccaatgatcagtcattcaacgactacctctctgcagctaacatgctttaccccatccctgccaatgcaaccaacattccaatttccatcccatctcgcaactgggcagccttcaggggctggtccttcaccagactcaaaaccaaggagactccatctcttggatcagggttcgatccctacttcgtttattctggatctattccctacctggatggcactttttaccttaaccacactttcaagaaggtctccatcatgtttgactcctcagtcagctggcctggcaatgacaggctgttgtctccaaatgagtttgaaatcaagcgcactgtggatggggaaggatacaatgtggcccaatgcaacatgaccaaagactggttcctggttcagatgcttgccaactacaacattggctaccagggcttttacatccctgagggatacaaggatcgcatgtactcctttttcagaaacttccagcctatgagcaggcaggtggttgatgaggttaattacactgactacaaagccgtcaccttaccatatcaacacaacaactctggctttgtaggataccttgcgcctactatgagacaaggggaaccttacccagccaattatccatacccgctcatcggaactactgccgttaaaagtgttacccaaaaaaagttcctgtgcgacaggaccatgtggcgcataccgttctccagcaacttcatgtccatgggagcccttacggacctgggacagaacctgctctatgccaactcggcccatgcgctggacatgacttttgaggtggatcccatggatgagcccaccctgctttatcttcttttcgaagtcttcgacgtggtcagagtgcaccagccacaccgcggcgtcatcgaggccgtctacctgcgcacaccgttctcggccggcaacgccaccacataagaagcctcttgcttcttgcaagcagcagctgcagccatgtcatgcgggtccggaaacggctccagcgagcaagagctcaaagccatcgtccgagacctgggttgcggaccctatttcctgggaacctttgacaagcgtttcccggggttcatggcccccgacaagctcgcctgcgccatagtcaacactgccggacgcgagacggggggagagcactggctggcttttggttggaacccgcgctccaacacctgctacctttttgatccttttgggttctcggatgagcgactcaaacagatttaccagtttgagtacgaggggctcctgcgccgcagtgcccttgctaccaaagaccgctgcatcaccctggaaaagtccacccagagcgtgcagggcccacgctcagccgcctgtggacttttttgctgtatgttccttcatgcctttgtgcactggcccgaccgccccatgaacggaaaccccaccatgaagttgctgactggggtgcccaacagcatgctccaatctccccaagtgcagcccaccctgcgccgcaaccaggaggcgctatatcgcttcctaaacacccactcatcttactttcgttctcaccgcgcacgcatcgaaagggccaccgcgtttgaccgtatggatatgcaataagtcatgtaaaaccgtgttcaataaaaagcactttatttttacatgcactaaggctctcgttttttactcattcgttttcattattcactcagaaatcaaatgggttctggcgggagtcaaagtgacccgcgggcagggatacgttgcggaactgtaacctgttctgccacttgaactcggggatcaccaacttgggaactggaatctcgggaaaggtgtcttgccacaactttctggtcagctgcagggcgccaagtaggtcaggagcagagatcttgaaatcacagttgggaccggcattctggacacgggagttgcggtacactgggttgcaacactggaacaccatcaaggctgggtgtctcacgcttgccagcacggtcgggtcactgatggtagtcacatccaagtcttcagcattggccatcccaaagggggtcatcttacaggtctgcctgcccatcacgggagcgcagcctggcttgtggttgcaatcgcaatgaatggggatcagcatcatcctggcttggtcgggggttatccctgggtacacggccttcatgaaggcttcgtactgcttgaaagcttcctgagccttacttccctcggtatagaacatcccacaggacttgctggaaaattgattagtagcacagttggcatcatttacacagcagcgggcatcgttgttggccaactggaccacatttctgccccagcggttctgggtgatcttggctctgtctgggttctccttcatagcgcgctgtccgttctcgctcgccacatccatctcgataatgtggtccttctgaatcatgatagtgccatgcaggcatttcaccttgccttcataatcggtgcatccatgagcccacagagcgcacccggtgcactcccaactattgtgggcgatctcagaataagaatgtaccaatccctgcatgaatcttcccatcatcgctgtcagggtcttcatgctactaaatgtcagcgggatgccacggtgctcctcgttcacatactggtggcagatacgcttgtactgctcgtgctgctctggcatcagcttgaaagaggttctcaggtcattatccagcctgtacctctccattagcacagccatcacttccatgcccttctcccaggcagataccaggggcaagctcaaaggattcctaacagcaatagaagtagctcctttagctatagggtcattcttgtcgatcttctcaacacttctcttgccatccttctcaatgatgcgcaccggggggtagctgaagcccacggccaccaactgagcctgttctctttcttcttcgctgtcgtggccgatgtcttgcagagggacatgcttggtctttctgggcttcttcttgggagggatcgggggaggactgttgctccgttccggagacagggatgaccgcgaagtttcgcttaccagtaccacctggctctcgatagaagaatcggaccccacgcgacggtaggtgttcctcttcgggggcagaggtggaggcgactgagatgggctgcggtctggccttggaagcggatggctggcagagcccattccgcgttcgggggtgtgctcccgttggcggtcgcttgactgatttcctccgcggctggccattgtgttctcctaggcagagaaacaacagacatggaaactcagccatcactgccaacatcgctgcaagcgccatcacacctcgcccccagcagcgacgaggaggagagcttaaccaccccaccacccagtccagctaccaccacctctaccctcgatgatgaggaggaggaggtcgacgcagcccaggagatgcaggcgcaggataatgtgaaagcggaagagattgaggcagatgtcgagcaggacccgggctatgtgacaccggcggagcacgaggaggagctgaaacgttttatagacagagaggatgacgaccgcccagagcatcaagcagatggcgatcaccaggaggctggcatcggggatcaagttgccgactacctcaccgggcttgggggggaagacgtgctcctcaaacatctagcaaggcagtcgaacatagttaaagacgcactactcgacctcaccgaagtgcccatcagtgtggaagagcttagccgcgcctacgagctgaacctcttttcgcctcacataccccccaagcggcagccaaacggcacctgcgaggccaaccctcgactgaacttctatccagcttttactgtccccgaagtgctggccacctaccacatcttttttaagaaccaaaagattccagtctcctgccgcgccaaccgcacccgcgccgatgcccttctcaacttgggtccgggagctcgcttacctgatatagcttccttggaagaggttccaaaaatctttgagggtctgggaagtgatgagactcgggccgcaaatgctctgcaacagggagagaatggcatggatgaacatcacagcgctttagtggaactggagggtgacaatgcccggcttgcagtgctcaagcgcagtatcgtggtcacccattttgcctaccccgctgttaacctgccccccaaagttatgagcgctgttatggaccatctgctcatcaaacgagcaggtccactttcagaaaaccagaacatgcaggatccagacgcctcggacgagggcaagccggtagtcagtgacgagcagctatctcgctggctgggtaccaactccccccgagatttggaagagaggcgcaagcttatgatggctgtagtgctagtaactgtggagctggagtgtttgcgccgctttttcaccgaccccgagaccctgcgcaagctagaggagaacctgcactacacctttagacatggcttcgtgcggcaggcatgcaagatctccaacgtggagcttaccaacctggtttcttacatgggcattttgcatgagaaccggctagggcagagcgtcctgcacaccacccttaaaggggaggcccgccgtgactacatccgagactgtgtctacctctacctctgccatacctggcagactggcatgggtgtgtggcaacagtgtttggaagagcagaacctaaaagagctggacaagctcttgcagagatccctcaaagccctgtggacaggttttgatgagcgcaccgtcgcctcggacctggcagacatcatcttccccgagcgtctcagggttactctgcgaaacggcctgccagactttatgagccagagcatgcttaacaactttcgctctttcatcctggaacgctccggtatcctgcctgccacctgctgtgcgctgccctccgactttgtgcctctcacctaccgcgagtgcccaccgccgctatggagccactgctacctgttccgcctggccaactacctctcctaccactcggatgttatagaggatgtgagcggagacggtctgctggaatgccactgccgctgcaatctttgcacaccccaccgctcccttgcctgcaacccccagttgctgagcgagacccagatcatcggcaccttcgagttgcagggtcccagcagtgaaggcgaggggtcttctccggggcagagtctgaaactgacaccggggctgtggacctccgcctacctgcgcaagtttcatcccgaggattaccacccctatgagatcaggttctatgaggaccagtcacatcctcccaaagtcgagctctcagcctgcgtcatcacccagggagcaattctggcccaattgcaagccatccaaaaatcccgccaagaatttctactgaaaaagggaagcggggtctaccttgacccccagaccggtgaggagctcaacacaaggttcccccaggatgtcccatcgccgaggaagcaagaagctgaaggtgcagctgacgcccccagaggatatggaggaagactgggacagtcaggcagaggaggagatggaagattgggacagccaggcagaggaggtggacagcctggaggaagacagtttggaggaggaagacgaggaggcagaggaggtggaagaagcaaccgccgccaaacagttgtcatcggcggcggagacaagcaagtccccagacagcagcacggctaccatctccgctccgggtcggggggtccagcggcggcccaacagtagatgggacgagaccgggcgattcccaaacccgaccaccgcttccaagaccggtaagaaggagcgacagggatacaagtcctggcgtggacataaaaacgctatcatctcctgcttgcatgaatgcgggggcaacatatccttcacccggcgatacctgctcttccaccacggtgtgaacttcccccgcaatatcttgcattactaccgtcacctccacagcccctactgcagtcagcaagtcccggcaaccccgacagaaaaagacagcagcgacaacggtgaccagaaaaccagcagttagaaaatctacaacaagtgcagcaggaggaggactgaggatcacagcgaacgagccagcgcagaccagagagctgaggaaccggatctttccaaccctctatgccatcttccagcagagtcgggggcaagagcaggaactgaaagtaaaaaaccgatctctgcgctcgctcaccagaagttgtttgtatcacaagagcgaagaccaacttcagcgcactctcgaggacgccgaggctctcttcaacaagtactgcgcgctgactcttaaagagtagcccttgcccgcgcttattcgaaaacggcgggaatcacgtcacccttggcacctgtcctttgccctagtcatgagtaaagagattcccacgccttacatgtggagctatcagccccaaatggggttggcagcaggcgcctcccaggactactccacccgcatgaattggcttagcgccgggccctcaatgatatcacgggttaatgatatacgagcttatcgaaaccagttactcctagaacagtcagctctcaccaccacaccccgccaacaccttaatccccgaaattggcccgccgccctggtgtaccaggaaactcccgctcccaccaccgtactacttcctcgagacgcccaggccgaagttcagatgactaacgcaggtgtacagctggcgggcggttccgccctatgtcgtcaccgacctcaacagagtataaaacgcctggtgatcagaggccgaggtatccagctcaacgacgagtcggttagctcttcgcttggtctgcgaccagacggagtcttccagatcgccggctgtgggagatcttccttcacccctcgtcaggctgtactgactttggagagttcgtcctcgcagccccgctcgggcggcatcggaactctccagttcgtggaggagtttactccctctgtctacttcaaccccttctccggctctcctggccagtacccagacgagttcataccgaacttcgacgcaatcagcgagtcagtggatggctatgattgatgtctaatggtggcgcggctgagctagctcgactgcgacacctagaccactgccgccgctttcgctgcttcgcccgggaactcaccgagttcatctacttcgaactccccgaggagcaccctcagggtccggcccacggagtgcggattaccatcgaagggggaatagactctcgcctgcatcgaatcttctcccagcgacccgtgctgattgagcgcgaccagggaaatacaaccatctccatttactgcatctgtaaccaccccggattgcatgaaagcctttgctgtcttgtttgtgctgagtttaataaaaactgagttaagaccctcctacggactaccgcttcttcaatcaggactttacaacaccaaccagatcttccagaagacccagacccttcctcctctgatccaggactctaactctaccttaccagcaccatccactactaaccttcccgaaactaacaagcttggatctcatctgcaacaccgcctttcacgaagccttctttctgccaatactaccactcccaaaaccggaggtgagctccgcggtctccctactgacgacccctgggtggtagcgggttttgtaacgttaggagtagttgcgggtgggcttgtgctaatcctttgctacctatacataccttgctgtgcatatttagtcatattgcgctgttggtttaaaaaatgggggccatattagtcgtgcttgctttactttcgcttttgggtctgggctctgctaatctcaatcctcttgatcacgatccatgtctagacttcgacccagaaaactgcacacttacttttgcacccgacacaagccgtctctgtggagttcttattaagtgcggatgggactgcaggtccgttgaaattacacataataataaaacatggaacaataccttatccaccacatgggagccaggagttcccgagtggtatactgtctctgtccgaggtcctgacggttccatccgcattagtaacaacacttttattttttctgaaatgtgcgatctggccatgttcatgagcagacagtatgacctatggcctcccagcaaagagaacattgtggcattttccattgcttattgcttggtaacatgcatcatcactgctatcatttgtgtgtgcatacacttgcttatagttattcgccctagacaaagcaataaggaaaaagagaaaatgccttaacctttttactcataccttttctttacagcatggcttttgttacagctctaattattgccaacattgtcactgtcgctcacgggcaaacaattatccatattaccttaggacataatcacacccttgtagggcccccaattacttcagaggttatttggaccaaacttggaagtgttgattattttgatataatttgcaacaaaactaaaccaatatttgtaatctgtaacagacaaaatctcacgttaattaatgttagcaaaatttataacggttactattatggttatgacagatccagtagtcaatataaaaattacttagttcgcataactcagcccaaattaacagtgcccactatgacaataattaaaatggctaataaagcattagaaaattttacatcaccaacaacgcccaatgaaaaaaacattccaaattcaatgattgcaattattgcggcggtggcattgggaatggcactaataataatatgcatgttcctatatgcttgttgctataaaaagtttcaacataaacaggatccactactaaattttaacatttaattttttatacagatgttttccactacaatttttatcattactagccttgcagctgtaacttatggccgttcacacctaactctacctgttggctcaacatgtacactacaaggaccccaacaaggctatgtcacttggtggagaatatatgataatggagggttcgctagaccatgtgatcagcctggtacaaaattttcatgcaacggaagagacttgaccataattaacataacatcaaatgagcaaggcttctattatggaaccaactataaagatagtttagattacaacattattgtagtgccagccaccacttctgctccccgcaaaaccactttctctagcagcagtgccaaagcaagcacaattcctaaaacagcttctgctatgttaaagcttcaaaaaatcgctttaaataattccacagccgctcccaatacaattcctaaatcaacaattggcatcattactgccgtggtagtgggattaattattatatttttgtgcataatgtactatgcctgctgctatagaaaacatgaacaaaaaggtgatgcattactaaattttgacatttaattttttatagaattatgatattgtttcaatcaaataccactaacactatcaatgtgcagactactttaaatcatgacatggaaaaccacactacctcctatgcatacacaaacattcagcctaaatacgctatgcaatagaaattctaaaagacgtcccatctattctcctatgattagtcgtccccatatggctttgaatgaaatctaagatcttttttttttttctcttacagtatggtgaacaccaatcatgatccctagaaatttcttcttcaccatactcatctgtgctttcaatgtctgtgctactttcacagcagtagccactgcaagcccagactgtataggaccatttgcttcctatgcactttttgccttcgttacttgcatctgcgtgtgtagcatagtctgcctggttattaattttttccaactggtagactggatctttgtacgaattgcctacctacgtcaccatcccgaataccgcaatcaaaatgttgcggcacttcttaggcttatttaaaaccatgcaggctatgctaccagtcattttaattctgctactaccctgcattgccctagcttccaccgccactcgcgctacacctgaacaacttagaaaatgcaaatttcaacaaccatggtcatttcttgattgctaccatgaaaaatctgatttccccacatactggatagtgattgttggaataattaacatactttcatgtacctttttctcaatcacaatataccccacatttaattttgggtggaattctcccaatgcactgggttacccacaagaaccagatgaacatatcccactacaacacatacaacaaccactagcactggtagagtatgaaaatgagccacaaccttcactacctcctgccattagttacttcaacctaaccggcggagatgactgaaatactcaccacctccaattccgccgaggatctgcttgatatggacggccgcgtctcagaacagcgactcgcccaactacgcatccgccagcagcaggaacgcgtgaccaaagagctcagagatgtcatccaaattcaccaatgcaaaaaaggcatattttgcttggtaaaacaagccaagatatcctacgagatcaccgctactgaccatcgcctctcttacgaacttggcccccaacgacaaaaatttacatgcatggtgggaatcacccctatagttatcactcagcaaagtggagatactaaggggtgcattcactgctcttgcgattccatcgagtgcacctacaccctgctaaagaccctatgcggcctaagagacctgctacccatgaattaaaaattaataaaaaatcacttacttgaaatcagcaataaggtctctgttgaaattttctcccagcagcacctcacttccctcttcccaactctggtattctaaaccccgttcagcggcatactttctccatactttaaaggggatgtcaaattttaactcctgtcctgtacccacaatcttcatgtctttcttcccagatgaccaagagagtccggctcagtgattccttcaaccctgtctacccctatgaagatgaaagcacctcccaacacccctttataaacccagggtttatttccccaaatggctttacacaaagcccagacggagttcttactttaaaatgtttaaccccactaacaaccacaggcgggtctctacagttaaaagtgggagggggtcttacaatagatgacaccgacggttttttgaaagaaaacataagtgccaccacaccactcgttaagactggtcactctataggtttgtcgctaggacccggattaggaacaaatgaaaacaaactttgtgccaaattgggagaaggacttacattcaattccaacaacatttgcattaatgacaatattaacaccctatggacaggagttaaccccaccagagccaactgtcaaataatggcctccagtgaatctaatgattgcaaattaattctaacactagttaaaactggagccctcgtcactgcatttgtttatgttataggagtatctaacgattttaatatgctaactacacataaaaatataaatttcactgcagagctgttttttgattctactggtaatttattaactagcctttcatccctaaaaactccacttaatcataaatcagggcaaaacatggctactggtgcccttactaatgctaaaggtttcatgcccagcacaactgcctatcctttcaatgttaattccagagaaaaagaaaactacatttacggaacttgttactacacagctagtgatcacactgcttttcccattgacatatctgtcatgcttaaccaaagagcattaaataatgagacatcatattgtattcgtgtaacttggtcctggaatacaggagttgccccagaagtgcaaacctctgctactaccctagtcacctctccatttaccttttactacattagagaagacgactgacaaataaagtttaacttgtttatttaaaatcaattcataaaattcgagtagttattttgcctcccccttcccatttaacagaatacaccaatctctccccacgcacagctttaaacatttggataccattacagatagacatagttttagattccacattccaaacagtttcaaagcgagccaatctggggtcagtgatacataaaaatgcatcgggatagtcttttaaagcgctttcacagtccaactgctgcggatgcgactccggagtctggatcacggtcatctggaagaagaacgatgggaatcataatccgaaaacggaatcgggcgattgtgtctcatcaaacccacaagcagccgctgtctgcgtcgctccgtgcgactgctgtttataggatcgggatccacagtgtcctgaagcatgattttaatagcccttaacattaactttctggtgcggtgcgcgcagcaacgcattctgatttcacttagattactacagtaggtacagcacattatcacaatattgtttaataaaccataattaaaagcgctccagccaaaactcatatcagatataatcgcccctgcatgaccatcataccaaattttaatataaattaaatgtcgttccctcaaaaacacactacccacatacataatctcttttggcatgtgcatattaacaatctgtctgtaccatggacaacgttggttaatcatgcaacccaatataaccttccgaaaccacactgccaacaccgctcccccagccatgcattgaagtgaaccctgccgattacaatgacaatgaagaacccaattctctcgaccatgaatcacttgagaataaaaaatatctatagtagcacaacaaagacataaatgcatgcatcttctcataattcttaactcctcgggatttagaaacatatcccaaggaatgggaaactcttgcagaacagtaaagctggcagaacaaggaagaccacgaacacaacttacactatgcatagtcatagtatcacaatctggcaacagcgggtggtcttcagtcatagaagctcgggtttcattttcctcacatcgtggtaactgggctctggtgtaagggtgatgtctggcgcatgatgtcgagcgtgcgcgcaaccttgtcataatggagttgcttcctgacattctcgtattttgtatagcaaaacgcggccctggcacaacacactcttcttcgtcttctatcctgccgcttagtgtgttccgtctgataattcaagtacagccacactcttaagttggtcaaaagaatgctggcttcagttgtaatcaaaactccatcatatttaattgttctaaggaaatcatccacggtagcatatgcaaatcccaaccaagcaatgcaactggattgcgtttcaagcagcagaggagagggaagagacggaagaatcatgttaatttttattccaaacgatctcgcagtacttcaaattgtagatcgcgcagatggcatctatcgcccccactgtgttggtgaaaaagcacagctaaatcaaaagaaatgcgattttcaaggtgctcaacggtggcttccaacaaagcctccacgcgcacatccaaaaacaaaagaataccaaaagaaggagcattttctaactcctcaaacatcatattacattcctgcaccattcccagataattttcagctttccagccttgaattattcgtgtcagttcttgtggtaaatccaaaccacacattacaaacaggtcccggagggcgccctccaccaccattcttaaacacaccctcataatgtcaaaatatcttgctcctgtgtcacctgtagcaaattaagaatggcatcatcaattgacatgcccttggctctaagttcttctctaagttctagttgtaaatactctttcatattatcaccaaactgcttagccagaagccccccgggaacaatagcaggggacgctacagtgcagtacaagcgcagacctccccaattggctccagcaaaaacaagattagaataagcatactgggaaccaccagtaatatcatcaaagttgctggaaatataatcaggcagagtttcttgtaaaaattgaataaaagaaaaattttccaaagaaacattcaaaacctctgggatgcaaatgcaataggttaccgcgctgcgctccaacattattagttttgaattagtctgtaaaataaaagaaacaagcgtcatatcatagtagcctgtcgaacaggtggataaatcagtctttccattacaagacaagccacagggtctccagctcgaccctcgtaaaacctgtcatcgtgattaaacaacagcaccgaaagttcctcgcggtggccagcatgaataattcttgatgaagcatataatccagacatgttagcatcagttaaagaaaaaaaacagccaacatagcctctgggtataattatgcttaatcttaagtatagcaaagccacccctcgcggatacaaagtaaaaggcacaggagaataaaaaatataattatttctctgctgctgttcaggcaacgttgcccccggtccctctaaatacacatacaaagcctcatcagccatggcttaccagacaaagtatagcgggcgcacaaagcacaagctctaaagaagctctaaagacgctctccaacctctccacaatatatacacaagccctaaactgacgtaatgggagtaaagtgtaaaaaatcccgccaagcccaacacacaccccgaaactgcgtcagcagggaaaagtacagtttcacttccgcaaacccaacaagcgtagcttcctctttctcacggtacgtcacatccgattaacttgcaacgtcattttcccacggccgccccgcccattttagccgttaaccccacagccaatcaccacacagcgcgcacttttttaaattacctcatttacatattggcaccattccatctataaggtatattatatagagag

SEQ ID NO: 147 - DNA, 34794 bp, Human mastadenovirus B
catcatcaataatataccttatagatggaatggtgccaatatgtaaatgaggtgattttaaaaagtgtggatcgtgtggtgattggctgtggggttaacggctaaaaggggcggtgcgaccgtgggaaaatgacgttttgtgggggtggagtttttttgcaagttgtcgcgggaaatgtgacgcataaaaaggcttttttctcacggaactacttagttttcccacggtatttaacaggaaatgaggtagttttgaccggatgcaagtgaaaattgttgattttcgcgcgaaaactgaatgaggaagtgtttttctgaataatgtggtatttatggcagggtggagtatttgttcagggccaggtagactttgacccattacgtggaggtttcgattaccgtgttttttacctgaatttccgcgtaccgtgtcaaagtcttctgtttttacgtaggtgtcagctgatcgctagggtatttatacctcagggtttgtgtcaagaggccactcttgagtgccagcgagaagagttttctcctctgcgccggcagtttaataataaaaaaatgagagatttgcgatttctgcctcaggaaataatctctgctgagactggaaatgaaatattggagcttgtggtgcacgccctgatgggagacgatccggagccacctgtgcagctttttgagcctcctacgcttcaggaactgtatgatttagaggtagagggatcggaggattctaatgaggaagctgtaaatggcttttttaccgattctatgcttttagctgctaatgaagggttagaattagatccgcctttggacacttttgatactccaggggtaattgtggaaagcggtacaggtgtaagaaaattacctgatttgagttccgtggactgtgatttgcactgctatgaagacgggtttcctccgagtgatgaggaggaccatgaaaaggagcagtccatgcagactgcagcgggtgagggagtgaaggctgccaatgttggttttcagttggattgcccggagcttcctggacatggctgtaagtcttgtgaatttcacaggaaaaatactggagtaaaggaactgttatgttcgctttgttatatgagaacgcactgccactttatttacagtaagtgtgtttaagttaaaatttaaaggaatatgctgtttttcacatgtatattgagtgtgagttttgtgcttcttattataggtcctgtgtctgatgctgatgaatcaccatctcctgattctactacctcacctcctgagattcaagcacctgttcctgtggacgtgcgcaagcccattcctgtgaagcttaagcctgggaaacgtccagcagtggaaaaacttgaggacttgttacagggtggggacggacctttggacttgagtacacggaaacgtccaagacaataagtgttccatatccgtgtttacttaaggtgacgtcaatatttgtgtgacagtgcaatgtaataaaaatatgttaactgttcactggtttttattgctttttgggcggggactcaggtatataagtagaagcagacctgtgtggttagctcataggagctggctttcatccatggaggtttgggccattttggaagaccttaggaagactaggcaactgttagagaacgcttcggacggagtctccggtttttggagattctggttcgctagtgaattagctagggtagtttttaggataaaacaggactataaccaagaatttgaaaagttgttggtagattgcccaggactttttgaagctcttaatttgggccatcaggttcactttaaagaaaaagttttatcagttttagacttttcaaccccaggtagaactgctgctgctgtggcttttcttacttttatattagataaatggatcccgcagactcatttcagcaggggatacgttttggatttcatagccacagcattgtggagaacatggaaggttcgcaagatgaggacaatcttaggttactggccagtgcagcctttgggtgtagcgggaatcctgaggcatccaccggtcatgccagcggttctggaggaggaacagcaagaggacaacccgagagccggcctggaccctccagtggaggaggcggagtagctgacttgtctcctgaactgcaacgggtgcttactggatctacgtccactggacgggataggggcgttaagagggagagggcatctagtggtactgatgctagatctgagttggctttaagtttaatgagtcgcagacgtcctgaaaccatttggtggcatgaggttcagaaagagggaagggatgaagtttctgtattgcaggagaaatattcactggaacaggtgaaaacatgttggttggagcctgaggatgattgggaggtggccattaaaaattatgccaagatagctttgaggcctgataaacagtataagattactagacggattaatatccggaatgcttgttacatatctggaaatggggctgaggtggtaatagatactcaagacaaggcagttattagatgctgcatgatggatatgtggcctggggtagtcggtatggaagcagtaacttttgtaaatgttaagtttaggggagatggttataatggaatagtgtttatggccaataccaaacttatattgcatggttgtagcttttttggtttcaacaatacctgtgtagatgcctggggacaggttagtgtacggggatgtagtttctatgcgtgttggattgccacagctggcagaaccaagagtcaattgtctctgaagaaatgcatatttcaaagatgtaacctgggcattctgaatgaaggcgaagcaagggtccgccactgcgcttctacagatactggatgttttattttgattaagggaaatgccagcgtaaagcataacatgatttgcggtgcttccgatgagaggccttatcaaatgctcacttgtgctggtgggcattgtaatatgctggctactgtgcatattgtttcccatcaacgcaaaaaatggcctgtttttgatcacaatgtgatgacgaagtgtaccatgcatgcaggtgggcgtagaggaatgtttatgccttaccagtgtaacatgaatcatgtgaaagtgttgttggaaccagatgccttttccagaatgagcctaacaggaatttttgacatgaacatgcaaatctggaagatcctgaggtatgatgatacgagatcgagggtacgcgcatgcgaatgcggaggcaagcatgccaggttccagccggtgtgtgtagatgtgactgaagatctcagaccggatcatttggttattgcccgcactggagcagagttcggatccagtggagaagaaactgactaaggtgagtattgggaaaactttggggtgggattttcagatggacagattgagtaaaaatttgttttttctgtcttgcagctgtcatgagtggaaacgcttcttttaaggggggagtcttcagcccttatctgacagggcgtctcccatcctgggcaggagttcgtcagaatgttatgggatctactgtggatggaagacccgtccaacccgccaattcttcaacgctgacctatgctactttaagttcttcacctttggacgcagctgcagctgccgccgccgcttctgttgccgctaacactgtgcttggaatgggttactatggaagcatcatggctaattccacttcctctaataacccttctaccctgactcaggacaagttacttgtccttttggcccagctggaggctttgacccaacgtctgggtgaactttctcagcaggtggtcgagttgcgagtacaaactgagtctgctgtcggcacggcaaagtctaaataaaaaaatcccagaatcaatgaataaataaacaagcttgttgttgatttaaaatcaagtgtttttatttcatttttcgcgcacggtatgccctagaccaccgatctctatcattgagaactcggtggattttttccaggatcctatagaggtgggattgaatgtttagatacatgggcattaggccgtctttggggtggagatagctccattgaagggattcatgctccggggtagtgttgtaaatcacccagtcataacaaggtcgcagtgcatggtgttgcacaatatcttttagaagtaggctgattgccacagataagcccttggtgtaggtgtttacaaaccggttgagctgggatgggtgcattcggggtgaaattatgtgcattttggattggatttttaagttggcaatattgccgccaagatcccgtcttgggttcatgttatgaaggaccaccaagacggtgtatccggtacatttaggaaatttatcgtgcagcttggatggaaaagcgtggaaaaatttggagacacccttgtgtcctccaagattttccatgcactcatccatgataatagcaatggggccgtgggcagcggcgcgggcaaacacgttccgtgggtctgacacatcatagttatgttcctgagttaaatcatcataagccattttaatgaatttggggcggagagtaccagattggggtatgaatgttccttcgggccccggagcatagttcccctcacagatttgcatttcccaagctttcagttccgagggtggaatcatgtccacctggggggctatgaaaaacaccgtttctggggcgggggtgattaattgtgatgatagcaaatttctgagcaattgagatttgccacatccggtggggccataaatgattccgattacgggttgcaggtggtagtttagggaacggcaactgccgtcttctcgaagcaagggggccacctcgttcatcatttcccttacatgcatattttcccgcaccaaatccattaggaggcgctctcctcctagtgatagaagttcttgtagtgaggaaaagtttttcagcggtttcagaccgtcagccatgggcattttggagagagtttgctgcaaaagttctagtctgttccacagttcagtgatgtgttctatggcatctcgatccagcagacctcctcgtttcgcgggtttggacggctcctggaatagggtatgagacgatgggcgtccagcgctgccagggttcggtccttccagggtctcagtgttcgagtcagggttgtttccgtcacagtgaaggggtgtgcgcctgcttgggcgcttgccagggtgcgcttcagactcatcctgctggtcgaaaacttctgtcgcttggcgccctgtatgtcggccaagtagcagtttaccatgagttcgtagttgagcgcctcggctgcgtggcctttggcgcggagcttacctttggaagttttcttgcataccgggcagtataggcatttcagcgcatacaacttgggcgcaaggaaaacggattctggggagtatgcatctgcgccgcaggaggcgcaaacagtttcacattccaccagccaggttaaatccggttcattggggtcaaaaacaagttttccgccatattttttgatgcgtttcttacctttggtctccatgagttcgtgtcctcgttgagtgacaaacaggctgtccgtgtccccgtagactgattttacaggcctcttctccagtggagtgcctcggtcttcttcgtacaggaactctgaccactctgatacaaaggcgcgcgtccaggccagcacaaaggaggctatgtgggaggggtagcgatcgttgtcaaccagggggtccaccttttccaaagtatgcaaacacatgtcaccctcttcaacatccaggaatgtgattggcttgtaggtgtatttcacgtgacctggggtccccgctgggggggtataaaagggggcggttctttgctcttcctcactgtcttccggatcgctgtccaggaacgtcagctgttggggtaggtattccctctcgaaggcgggcatgacctctgcactcaggttgtcagtttctaagaacgaggaggatttgatattgacagtgccggttgagatgcctttcatgaggttttcgtccatttggtcagaaaacacaatttttttattgtcaagtttggtggcaaatgatccatacagggcgttggataaaagtttggcaatggatcgcatggtttggttcttttccttgtccgcgcgctctttggcggcgatgttgagttggacatactcgcgtgccaggcacttccattcggggaagatagttgttaattcatctggcacgattctcacttgccaccctcgattatgcaaggtaattaaatccacactggtggccacctcgcctcgaaggggttcattggtccaacagagcctacctcctttcctagaacagaaagggggaagtgggtctagcataagttcatcgggagggtctgcatccatggtaaagattcccggaagtaaatccttatcaaaatagctgatgggagtggggtcatctaaggccatttgccattctcgagctgccagtgcgcgctcatatgggttaaggggactgccccatggcatgggatgggtgagtgcagaggcatacatgccacagatgtcatagacgtagatgggatcctcaaagatgcctatgtaggttggatagcatcgcccccctctgatacttgctcgcacatagtcatatagttcatgtgatggcgctagcagccccggacccaagttggtgcgattgggtttttctgttctgtagacgatctggcgaaagatggcgtgagaattggaagagatggtgggtctttgaaaaatgttgaaatgggcatgaggtagacctacagagtctctgacaaagtgggcataagattcttgaagcttggttaccagttcggcggtgacaagtacgtctagggcgcagtagtcaagtgtttcttgaatgatgtcataacctggttggtttttcttttcccacagttcgcggttgagaaggtattcttcgcgatccttccagtactcttctagcggaaacccgtctttgtctgcacggtaagatcctagcatgtagaactgattaactgccttgtaagggcagcagcccttctctacgggtagagagtatgcttgagcagcttttcgtagcgaagcgtgagtaagggcaaaggtgtctctgaccatgactttgagaaattggtatttgaagtcgatgtcgtcacaggctccctgttcccagagttggaagtctacccgtttcttgtaggcggggttgggcaaagcgaaagtaacatcattgaagagaatcttaccggctctgggcataaaattgcgagtgatgcgaaaaggctgtggtacttccgctcgattgttgatcacctgggcagctaggacgatctcgtcgaaaccgttgatgttgtgtcctacgatgtataattctatgaaacgcggcgtgcctctgacgtgaggtagcttactgagctcatcaaaggttaggtctgtggggtcagataaggcgtagtgttcgagagcccattcgtgcaggtgaggatttgcatgtaggaatgatgaccaaagatctaccgccagtgctgtttgtaactggtcccgatactgacgaaaatgccggccaattgccattttttctggagtgacacagtagaaggttctggggtcttgttgccatcgatcccacttgagtttaatggctagatcgtgggccatgttgacgagacgctcttctcctgagagtttcatgaccagcatgaaaggaactagttgtttgccaaaggatcccatccaggtgtaagtttccacatcgtaggtcaggaagagtctttctgtgcgaggatgagagccgatcgggaagaactggatttcctgccaccagttggaggattggctgttgatgtgatggaagtagaagtttctgcggcgcgccgagcattcgtgtttgtgcttgtacagacggccgcagtagtcgcagcgttgcacgggttgtatctcgtgaatgagttgtacctggcttcccttgacgagaaatttcagtgggaagccgaggcctggcgattgtatctcgtgctcttctatattcgctgtatcggcctgttcatcttctgtttcgatggtggtcatgctgacgagcccccgcgggaggcaagtccagacctcggcgcgggaggggcggagctgaaggacgagagcgcgcaggctggagctgtccagagtcctgagacgctgcggactcaggttagtaggtagggacagaagattaacttgcatgatcttttccagggcgtgcgggaggttcagatggtacttgatttccacaggttcgtttgtagagacgtcaatggcttgcagggttccgtgtcctttgggcgccactaccgtacctttgttttttcttttgatcggtggtggctctcttgcttcttgcatgctcagaagcggtgacggggacgcgcgccgggcggcagcggttgttccggacccgagggcatggctggtagtggcacgtcggcgccgcgcacgggcaggttctggtactgcgctctgagaagacttgcgtgcgccaccacgcgtcgattgacgtcttgtatctgacgtctctgggtgaaagctaccggccccgtgagcttgaacctgaaagagagttcaacagaatcaatttcggtatcgttaacggcagcttgtctcagtatttcttgtacgtcaccagagttgtcctggtaggcgatctccgccatgaactgctcgatttcttcctcctgaagatctccgcgacccgctctttcgacggtggccgcgaggtcattggagatacggcccatgagttgggagaatgcattcatgcccgcctcgttccagacgcggctgtaaaccacggccccctcggagtctcttgcgcgcatcaccacctgagcgaggttaagctccacgtgtctggtgaagaccgcatagttgcataggcgctgaaaaaggtagttgagtgtggtggcaatgtgttcggcgacgaagaaatacatgatccatcgtctcagcggcatttcgctaacatcgcccagagcttccaagcgctccatggcctcgtagaagtccacggcaaaattaaaaaactgggagtttcgcgcggacacggtcaattcctcctcgagaagacggatgagttcggctatggtggcccgtacttcgcgttcgaaggctcccgggatctcttcttcctcttctatctcttcttccactaacatctcttcttcgtcttcaggcgggggcggagggggcacgcggcgacgtcgacggcgcacgggcaaacggtcgatgaatcgttcaatgacctctccgcggcggcggcgcatggtttcagtgacggcgcggccgttctcgcgcggtcgcagagtaaaaacaccgccgcgcatctccttaaagtggtgactgggaggttctccgtttgggagggagagggcgctgattatacattttattaattggcccgtagggactgcacgcagagatctgatcgtgtcaagatccacgggatctgaaaacctttcgacgaaagcgtctaaccagtcacagtcacaaggtaggctgagtacggcttcttgtgggcgggggtggttatgtgttcggtctgggtcttctgtttcttcttcatctcgggaaggtgagacgatgctgctggtgatgaaattaaagtaggcagttctaagacggcggatggtggcgaggagcaccaggtctttgggtccggcttgctggatacgcaggcgattggccattccccaagcattatcctgacatctagcaagatctttgtagtagtcttgcatgagccgttctacgggcacttcttcctcacccgttctgccatgcatacgtgtgagtccaaatccgcgcattggttgtaccagtgccaagtcagctacgactctttcggcgaggatggcttgctgtacttgggtaagggtggcttgaaagtcatcaaaatccacaaagcggtggtaagctcctgtattaatggtgtaagcacagttggccatgactgaccagttaactgtctggtgaccagggcgcacgagctcggtgtatttaaggcgcgaataggcgcgggtgtcaaagatgtaatcgttgcaggtgcgcaccagatactggtaccctataagaaaatgcggcggtggttggcggtagagaggccatcgttctgtagctggagcgccaggggcgaggtcttccaacataaggcggtgatagccgtagatgtacctggacatccaggtgattcctgcggcggtagtagaagcccgaggaaactcgcgtacgcggttccaaatgttgcgtagcggcatgaagtagttcattgtaggcacggtttgaccagtgaggcgcgcgcagtcattgatgctctatagacacggagaaaatgaaagcgttcagcgactcgactccgtagcctggaggaacgtgaacgggttgggtcgcggtgtaccccggttcgagacttgtactcgagccggccggagccgcggctaacgtggtattggcactcccgtctcgacccagcctacaaaaatccaggatacggaatcgagtcgttttgctggtttccgaatggcagggaagtgagtcctattttttttttttgccgctcagatgcatcccgtgctgcgacagatgcgcccccaacaacagcccccctcgcagcagcagcagcagcaatcacaaaaggctgtccctgcaactactgcaactgccgccgtgagcggtgcgggacagcccgcctatgatctggacttggaagagggcgaaggactggcacgtctaggtgcgccttcacccgagcggcatccgcgagttcaactgaaaaaagattctcgcgaggcgtatgtgccccaacagaacctatttagagacagaagcggcgaggagccggaggagatgcgagcttcccgctttaacgcgggtcgtgagctgcgtcacggtttggaccgaagacgagtgttgcgggacgaggatttcgaagttgatgaaatgacagggatcagtcctgccagggcacacgtggctgcagccaaccttgtatcggcttacgagcagacagtaaaggaagagcgtaacttccaaaagtcttttaataatcatgtgcgaaccctgattgcccgcgaagaagttacccttggtttgatgcatttgtgggatttgatggaagctatcattcagaaccctactagcaaacctctgaccgcccagctgtttctggtggtgcaacacagcagagacaatgaggctttcagagaggcgctgctgaacatcaccgaacccgaggggagatggttgtatgatcttatcaacattctacagagtatcatagtgcaggagcggagcctgggcctggccgagaaggtggctgccatcaattactcggttttgagcttgggaaaatattacgctcgcaaaatctacaagactccatacgttcccatagacaaggaggtgaagatagatgggttctacatgcgcatgacgctcaaggtcttgaccctgagcgatgatcttggggtgtatcgcaatgacagaatgcatcgcgcggttagcgccagcaggaggcgcgagttaagcgacagggaactgatgcacagtttgcaaagagctctgactggagctggaaccgagggtgagaattacttcgacatgggagctgacttgcagtggcagcctagtcgcagggctctgagcgccgcgacggcaggatgtgagcttccttacatagaagaggcggatgaaggcgaggaggaagagggcgagtacttggaagactgatggcacaacccgtgttttttgctagatggaacagcaagcaccggatcccgcaatgcgggcggcgctgcagagccagccgtccggcattaactcctcggacgattggacccaggccatgcaacgtatcatggcgttgacgactcgcaaccccgaagcctttagacagcaaccccaggccaaccgtctatcggccatcatggaagctgtagtgccttcccgctctaatcccactcatgagaaggtcctggccatcgtgaacgcgttggtggagaacaaagctattcgtccagatgaggccggactggtatacaacgctctcttagaacgcgtggctcgctacaacagtagcaatgtgcaaaccaatttggaccgtatgataacagatgtacgcgaagccgtgtctcagcgcgaaaggttccagcgtgatgccaacctgggttcgctggtggcgttaaatgctttcttgagtactcagcctgctaatgtgccgcgtggtcaacaggattatactaactttttaagcgctttgagactgatggtatcagaagtacctcagagcgaagtgtatcagtccggtcctgattacttctttcagactagcagacagggcttgcagacggtaaatctgagccaagcttttaaaaaccttaaaggtttgtggggagtgcatgccccggtaggagaaagagcaaccgtgtctagcttgttaactccgaactcccgcctattattactgttggtagctcctttcaccgacagcggtagcatcgaccgtaattcctatttgggttacctactaaacctgtatcgcgaagccatagggcaaagtcaggtggacgagcagacctatcaagaaattacccaagtcagtcgcgctttgggacaggaagacactggcagtttggaagccactctgaacttcttgcttaccaatcggtctcaaaagatccctcctcaatatgctcttactgcggaggaggagaggatccttagatatgtgcagcagagcgtgggattgtttctgatgcaagagggggcaactccgactgcagcactggacatgacagcgcgaaatatggagcccagcatgtatgccagtaaccgacctttcattaacaaactgctggactacttgcacagagctgccgctatgaactctgattatttcaccaatgccatcttaaacccgcactggctgcccccacctggtttctacacgggcgaatatgacatgcccgaccctaatgacggatttctgtgggacgacgtggacagcgatgttttttcacctctttctgatcatcgcacgtggaaaaaggaaggcggcgatagaatgcattcttctgcatcgctgtccggggtcatgggtgctaccgcggctgagcccgagtctgcaagtccttttcctagtctacccttttctctacacagtgtacgtagcagcgaagtgggtagaataagtcgcccgagtttaatgggcgaagaggagtatctaaacgattccttgctcagaccggcaagagaaaaaaatttcccaaacaatggaatagaaagtttggtggataaaatgagtagatggaagacttatgctcaggatcacagagacgagcctgggatcatggggattacaagtagagcgagccgtagacgccagcgccatgacagacagaggggtcttgtgtgggacgatgaggattcggccgatgatagcagcgtgctggacttgggtgggagaggaaggggcaacccgtttgctcatttgcgccctcgcttgggtggtatgttgtaaaaaaaaataaaaaaaaaactcaccaaggccatggcgacgagcgtacgttcgttcttctttattatctgtgtctagtataatgaggcgagtcgtgctaggcggagcggtggtgtatccggagggtcctcctccttcgtacgagagcgtgatgcagcagcagcaggcgacggcggtgatgcaatccccactggaggctccctttgtgcctccgcgatacctggcacctacggagggcagaaacagcattcgttattcggaactggcacctcagtacgataccaccaggttgtatctggtggacaacaagtcggcggacattgcttctctgaactatcagaatgaccacagcaacttcttgaccacggtggtgcaaaacaatgactttacccctacggaagccagcacccagaccattaactttgatgaacgatcgcggtggggcggtcagctaaagaccatcatgcatactaacatgccaaacgtgaacgagtatatgtttagtaacaagttcaaagcgcgtgtgatggtgtccagaaaacctcccgacggtgctgcagttggggatacttatgatcacaagcaggatattttgaaatatgagtggttcgagtttactttgccagaaggcaacttttcagttactatgactattgatttgatgaacaatgccatcatagataattacttgaaagtgggtagacagaatggagtgcttgaaagtgacattggtgttaagttcgacaccaggaacttcaagctgggatgggatcccgaaaccaagttgatcatgcctggagtgtatacgtatgaagccttccatcctgacattgtcttactgcctggctgcggagtggattttaccgagagtcgtttgagcaaccttcttggtatcagaaaaaaacagccatttcaagagggttttaagattttgtatgaagatttagaaggtggtaatattccggccctcttggatgtagatgcctatgagaacagtaagaaagaacaaaaagccaaaatagaagctgctacagctgctgcagaagctaaggcaaacatagttgccagcgactctacaagggttgctaacgctggagaggtcagaggagacaattttgcgccaacacctgttccgactgcagaatcattattggccgatgtgtctgaaggaacggacgtgaaactcactattcaacctgtagaaaaagatagtaagaatagaagctataatgtgttggaagacaaaatcaacacagcctatcgcagttggtatctttcgtacaattatggcgatcccgaaaaaggagtgcgttcctggacattgctcaccacctcagatgtcacctgcggagcagagcaggtctactggtcgcttccagacatgatgaaggatcctgtcactttccgctccactagacaagtcagtaactaccctgtggtgggtgcagagcttatgcccgtcttctcaaagagcttctacaacgaacaagctgtgtactcccagcagctccgccagtccacctcgcttacgcacgtcttcaaccgctttcctgagaaccagattttaatccgtccgccggcgcccaccattaccaccgtcagtgaaaacgttcctgctctcacagatcacgggaccctgccgttgcgcagcagtatccggggagtccaacgtgtgaccgttactgacgccagacgccgcacctgtccctacgtgtacaaggcactgggcatagtcgcaccgcgcgtcctttcaagccgcactttctaaaaaaaaaaaaaatgtccattcttatctcgcccagtaataacaccggttggggtctgcgcgctccaagcaagatgtacggaggcgcacgcaaacgttctacccaacatcctgtccgtgttcgcggacattttcgcgctccatggggcgccctcaagggccgcactcgcgttcgaaccaccgtcgatgatgtaatcgatcaggtggttgccgacgcccgtaattatactcctactgcgcctacatctactgtggatgcagttattgacagtgtagtggctgacgctcgcaactatgctcgacgtaagagccggcgaaggcgcattgccagacgccaccgagctaccactgccatgcgagccgcaagagctctgctacgaagagctagacgcgtggggcgaagagccatgcttagggcggccagacgtgcagcttcgggcgccagcgccggcaggtcccgcaggcaagcagccgctgtcgcagcggcgactattgccgacatggcccaatcgcgaagaggcaatgtatactgggtgcgtgacgctgccaccggtcaacgtgtacccgtgcgcacccgtccccctcgcacttagaagatactgagcagtctccgatgttgtgtcccagcggcgaggatgtccaagcgcaaatacaaggaagaaatgctgcaggttatcgcacctgaagtctacggccaaccgttgaaggatgaaaaaaaaccccgcaaaatcaagcgggttaaaaaggacaaaaaagaagaggaagatggcgatgatgggctggcggagtttgtgcgcgagtttgccccacggcgacgcgtgcaatggcgtgggcgcaaagttcgacatgtgttgagacctggaacttcggtggtctttacacccggcgagcgttcaagcgctacttttaagcgttcctatgatgaggtgtacggggatgatgatattcttgagcaggcggctgaccgattaggcgagtttgcttatggcaagcgtagtagaataacttccaaggatgagacagtgtcgatacccttggatcatggaaatcccacccctagtcttaaaccggtcactttgcagcaagtgttacccgtaactccgcgaacaggtgttaaacgcgaaggtgaagatttgtatcccactatgcaactgatggtacccaaacgccagaagttggaggacgttttggagaaagtaaaagtggatccagatattcaacctgaggttaaagtgagacccattaagcaggtagcgcctggtctgggggtacaaactgtagacattaagattcccactgaaagtatggaagtgcaaactgaacccgcaaagcctactgccacctccactgaagtgcaaacggatccatggatgcccatgcctattacaactgacgccgccggtcccactcgaagatcccgacgaaagtacggtccagcaagtctgttgatgcccaattatgttgtacacccatctattattcctactcctggttaccgaggcactcgctactatcgcagccgaaacagtacctcccgccgtcgccgcaagacacctgcaaatcgcagtcgtcgccgtagacgcacaagcaaaccgactcccggcgccctggtgcggcaagtgtaccgcaatggtagtgcggaacctttgacactgccgcgtgcgcgttaccatccgagtatcatcacttaatcaatgttgccgctgcctccttgcagatatggccctcacttgtcgccttcgcgttcccatcactggttaccgaggaagaaactcgcgccgtagaagagggatgttgggacgcggaatgcgacgctacaggcgacggcgtgctatccgcaagcaattgcggggtggttttttaccagccttaattccaattatcgctgctgcaattggcgcgataccaggcatagcttccgtggcggttcaggcctcgcaacgacattgacattggaaaaaaacgtataaataaaaaaaaaaaaatacaatggactctgacactcctggtcctgtgactatgttttcttagagatggaagacatcaatttttcatccttggctccgcgacacggcacgaagccgtacatgggcacctggagcgacatcggcacgagccaactgaacgggggcgccttcaattggagcagtatctggagcgggcttaaaaattttggctcaaccataaaaacatacgggaacaaagcttggaacagcagtacaggacaggcgcttagaaataaacttaaagaccagaacttccaacaaaaagtagtcgatgggatagcttccggcatcaatggagtggtagatttggctaaccaggctgtgcagaaaaagataaacagtcgtttggacccgccgccagcaaccccaggtgaaatgcaagtggaggaagaaattcctccgccagaaaaacgaggcgacaagcgtccgcgtcccgatttggaagagacgctggtgacgcgcgtagatgaaccgccttcttatgaggaagcaacgaagcttggaatgcccaccactagaccgatagccccaatggccaccggggtgatgaaaccttctcagttgcatcgacccgtcaccttggatttgccccctccccctgctgctactgctgtacccgcttctaagcctgtcgctgccccgaaaccagtcgccgtagccaggtcacgtcccgggggcgctcctcgtccaaatgcgcactggcaaaatactctgaacagcatcgtgggtctaggcgtgcaaagtgtaaaacgccgtcgctgcttttaattaaatatggagtagcgcttaacttgcctatctgtgtatatgtgtcattacacgccgtcacagcagcagaggaaaaaaggaagaggtcgtgcgtcgacgctgagttactttcaagatggccaccccatcgatgctgccccaatgggcatacatgcacatcgccggacaggatgcttcggagtacctgagtccgggtctggtgcagttcgcccgcgccacagacacctacttcaatctgggaaataagtttagaaatcccaccgtagcgccgacccacgatgtgaccaccgaccgtagccagcggctcatgttgcgcttcgtgcccgttgaccgggaggacaatacatactcttacaaagtgcggtacaccctggccgtgggcgacaacagagtgctggatatggccagcacgttctttgacattaggggtgtgttggacagaggtcccagtttcaaaccctattctggtacggcttacaactccctggctcctaaaggcgctccaaatacatctcagtggattgcagaaggtgtaaaaaatacaactggtgaggaacacgtaacagaagaggaaaccaatactactacttacacttttggcaatgctcctgtaaaagctgaagctgaaattacaaaagaaggactcccagtaggtttggaagtttcagatgaagaaagtaaaccgatttatgctgataaaacatatcagccagaacctcagctgggagatgaaacttggactgaccttgatggaaaaaccgaaaagtatggaggcagggctctcaaacccgatactaagatgaaaccatgctacgggtcctttgccaaacctactaatgtgaaaggcggtcaggcaaaacaaaaaacaacggagcagccaaatcagaaagtcgaatatgatatcgacatggagttttttgatgcggcatcgcagaaaacaaacttaagtcctaaaattgtcatgtatgcagaaaatgtaaatttggaaactccagacactcatgtagtgtacaaacctggaacagaagacacaagttccgaagctaatttgggacaacaatctatgcccaacagacccaactacattggcttcagagataactttattggacttatgtactataacagtactggtaacatgggggtgctggctggtcaagcgtctcagttaaatgcagtggttgacttgcaggacagaaacacagaactttcttaccaactcttgcttgactctctgggcgacagaaccagatactttagcatgtggaatcaggctgtggacagttatgatcctgatgtacgtgttattgaaaatcatggtgtggaagatgaacttcccaactactgttttccactggacggcataggtgttccaacaaccagttacaaatcaatagttccaaatggagacaatgcgcctaattggaaggaacctgaagtaaatggaacaagtgagatcggacagggtaatttgtttgccatggaaattaaccttcaagccaatctatggcgaagtttcctttattccaatgtggctctatatctcccagactcgtacaaatacaccccgtccaatgtcactcttccagaaaacaaaaacacctacgactacatgaacgggcgggtggtgccgccatctctagtagacacctatgtgaacattggtgccaggtggtctctggatgccatggacaatgtcaacccattcaaccaccaccgtaacgctggcttgcgttaccgatccatgcttctgggtaacggacgttatgtgcctttccacatacaagtgcctcaaaaattcttcgctgttaaaaacctgctgcttctcccaggctcctacacttatgagtggaactttaggaaggatgtgaacatggttctacagagttccctcggtaacgacctgcgggtagatggcgccagcatcagtttcacgagcatcaacctctatgctacttttttccccatggctcacaacaccgcttccacccttgaagccatgctgcggaatgacaccaatgatcagtcattcaacgactacctatctgcagctaacatgctctaccccattcctgccaatgcaaccaatattcccatttccattccttctcgcaactgggcggctttcagaggctggtcatttaccagactgaaaaccaaagaaactccctctttggggtctggatttgacccctactttgtctattctggttctattccctacctggatggtaccttctacctgaaccacacttttaagaaggtttccatcatgtttgactcttcagtgagctggcctggaaatgacaggttactatctcctaacgaatttgaaataaagcgcactgtggatggcgaaggctacaacgtagcccaatgcaacatgaccaaagactggttcttggtacagatgctcgccaactacaacatcggctatcagggcttctacattccagaaggatacaaagatcgcatgtattcatttttcagaaacttccagcccatgagcaggcaggtggttgatgaggtcaattacaaagacttcaaggccgtcgccataccctaccaacacaacaactctggctttgtgggttacatggctccgaccatgcgccaaggtcaaccctatcccgctaactatccctatccactcattggaacaactgccgtaaatagtgttacgcagaaaaagttcttgtgtgacagaaccatgtggcgcataccgttctcgagcaacttcatgtctatgggggcccttacagacttgggacagaatatgctctatgccaactcagctcatgctctggacatgacctttgaggtggatcccatggatgagcccaccctgctttatcttctcttcgaagttttcgacgtggtcagagtgcatcagccacaccgcggcatcatcgaggcagtctacctgcgtacaccgttctcggccggtaacgctaccacgtaagaagcttcttgcttcttgcaaatagcagctgcaaccatggcctgcggatcccaaaacggctccagcgagcaagagctcagagccattgtccaagacctgggttgcggaccctattttttgggaacctacgataagcgcttcccggggttcatggcccccgataagctcgcctgtgccattgtaaatacggccggacgtgagacggggggagagcactggttggctttcggttggaacccacgttctaacacctgctacctttttgatccttttggattctcggatgatcgtctcaaacagatttaccagtttgaatatgagggtctcctgcgccgcagcgctcttgctaccaaggaccgctgtattacgctggaaaaatctacccagaccgtgcagggtccccgttctgccgcctgcggacttttctgctgcatgttccttcacgcctttgtgcactggcctgaccgtcccatggacggaaaccccaccatgaaattgctaactggagtgccaaacaacatgcttcattctcctaaagtccagcccaccctgtgtgacaatcaaaaagcactctaccattttcttaatacccattcgccttattttcgctcccatcgtacacacatcgaaagggccactgcgttcgaccgtatggatgttcaataatgactcatgtaaacaacgtgttcaataaacatcactttatttttttacatgtatcaaggctctgcattacttatttatttacaagtcgaatgggttctgacgagaatcagaatgacccgcaggcagtgatacgttgcggaactgatacttgggttgccacttgaattcgggaatcaccaacttgggaaccggtatatcgggcaggatgtcactccacagctttctggtcagctgcaaagctccaagcaggtcaggagccgaaatcttgaaatcacaattaggaccagtgctttgagcgcgagagttgcggtacaccggattgcagcactgaaacaccatcagcgacggatgtctcacgcttgccagcacggtgggatctgcaatcatgcccacatccagatcttcagcattggcaatgctgaacggggtcatcttgcaggtctgcctacccatggcgggcacccaattaggcttgtggttgcaatcgcagtgcagggggatcagtatcatcttggcctgatcctgtctgattcctggatacacggctctcatgaaagcatcatattgcttgaaagcctgctgggctttactaccctcggtataaaacatcccgcaggacctgctcgaaaactggttagctgcacagccggcatcattcacacagcagcgggcgtcattgttagctatttgcaccacacttctgccccagcggttttgggtgattttggttcgctcgggattctcctttaaggctcgttgtccgttctcgctggccacatccatctcgataatctgctccttctgaatcataatattgccatgcaggcacttcagcttgccctcataatcattgcagccatgaggccacaacgcacagcctgtacattcccaattatggtgggcgatctgagaaaaagaatgtatcattccctgcagaaatcttcccatcatcgtgctcagtgtcttgtgactagtgaaagttaactggatgcctcggtgctcctcgtttacgtactggtgacagatgcgcttgtattgttcgtgttgctcaggcattagtttaaaagaggttctaagttcgttatccagcctgtacttctccatcagcagacacatcacttccatgcctttctcccaagcagacaccaggggcaagctaatcggattcttaacagtgcaggcagcagctcctttagccagagggtcatctttagcgatcttctcaatgcttcttttgccatccttctcaacgatgcgcacgggcgggtagctgaaacccactgctacaagttgcgcctcttctctttcttcttcgctgtcttgactgatgtcttgcatggggatatgtttggtcttccttggcttctttttggggggtatcggaggaggaggactgtcgctccgttccggagacagggaggattgtgacgtttcgctcaccattaccaactgactgtcggtagaagaacctgaccccacacggcgacaggtgtttctcttcgggggcagaggtggaggcgattgcgaagggctgcggtccgacctggaaggcggatgactggcagaaccccttccgcgttcgggggtgtgctccctgtggcggtcgcttaactgatttccttcgcggctggccattgtgttctcctaggcagagaaacaacagacatggaaactcagccattgctgtcaacatcgccacgagtgccatcacatctcgtcctcagcgacgaggaaaaggagcagagcttaagcattccaccgcccagtcctgccaccacctctaccctagaagataaggaggtcgacgcatctcatgacatgcagaataaaaaagcgaaagagtctgagacagacatcgagcaagacccgggctatgtgacaccggtggaacacgaggaagagttgaaacgctttctagagagagaggatgaaaactgcccaaaacaacgagcagataactatcaccaagatgctggaaatagggatcagaacaccgactacctcatagggcttgacggggaagacgcgctccttaaacatctagcaagacagtcgctcatagtcaaggatgcattattggacagaactgaagtgcccatcagtgtggaagagctcagccgcgcctacgagcttaacctcttttcacctcgtactccccccaaacgtcagccaaacggcacctgcgagccaaatcctcgcttaaacttttatccagcttttgctgtgccagaagtactggctacctatcacatcttttttaaaaatcaaaaaattccagtctcctgccgcgctaatcgcacccgcgccgatgccctactcaatctgggacctggttcacgcttacctgatatagcttccttggaagaggttccaaagatcttcgagggtctgggcaataatgagactcgggccgcaaatgctctgcaaaagggagaaaatggcatggatgagcatcacagcgttctggtggaattggaaggcgataatgccagactcgcagtactcaagcgaagcatcgaggtcacacacttcgcatatcccgctgtcaacctgccccctaaagtcatgacggcggtcatggaccagttactcattaagcgcgcaagtcccctttcagaagacatgcatgacccagatgcctgtgatgagggtaaaccagtggtcagtgatgagcagctaacccgatggctgggcaccgactctcccagggatttggaagagcgtcgcaagcttatgatggccgtggtgctggttaccgtagaactagagtgtctccgacgtttctttaccgattcagaaaccttgcgcaaactcgaagagaatctgcactacacttttagacacggctttgtgcggcaggcatgcaagatatctaacgtggaactcaccaacctggtttcctacatgggtattctgcatgagaatcgcctaggacaaagcgtgctgcacagcaccctgaagggggaagcccgccgtgattacatccgcgattgtgtctatctgtacctgtgccacacgtggcaaaccggcatgggtgtatggcagcaatgtttagaagaacagaacttgaaagagcttgacaagctcttacagaaatctcttaaggttctgtggacagggttcgacgagcgcaccgtcgcttccgacctggcagacctcatcttcccagagcgtctcagggttactttgcgaaacggattgcctgactttatgagccagagcatgcttaacaattttcgctctttcatcctggaacgctccggtatcctgcccgccacctgctgcgcactgccctccgactttgtgcctctcacctaccgcgagtgccccccgccgctatggagtcactgctacctgttccgtctggccaactatctctcctaccactcggatgtgatcgaggatgtgagcggagacggcttgctggagtgtcactgccgctgcaatctgtgcacgccccaccggtccctagcttgcaacccccagttgatgagcgaaacccagataataggcacctttgaattgcaaggccccagcagccaaggcgatgggtcttctcctgggcaaagtttaaaactgaccccgggactgtggacctccgcctacttgcgcaagtttgctccggaagattaccacccctatgaaatcaagttctatgaggaccaatcacagcctccaaaggccgaactttcggcctgcgtcatcacccagggggcaattctggcccaattgcaagccatccaaaaatcccgccaagaatttctactgaaaaagggtaagggggtctaccttgacccccagaccggcgaggaactcaacacaaggttccctcaggatgtcccaacgacgagaaaacaagaagttgaaggtgcagccgccgcccccagaagatatggaggaagattgggacagtcaggcagaggaggcggaggaggacagtctggaggacagtctggaggaagacagtttggaggaggaaaacgaggaggcagaggaggtggaagaagtaaccgccgacaaacagttatcctcggctgcggagacaagcaacagcgctaccatctccgctccgagtcgaggaacccggcggcgtcccagcagtagatgggacgagaccggacgcttcccgaacccaaccagcgcttccaagaccggtaagaaggatcggcagggatacaagtcctggcgggggcataagaatgccatcatctcctgcttgcatgagtgcgggggcaacatatccttcacgcggcgctacttgctattccaccatggggtgaactttccgcgcaatgttttgcattactaccgtcacctccacagcccctactatagccagcaaatcccggcagtctcgacagataaagacagcggcggcgacctccaacagaaaaccagcagcggcagttagaaaatacacaacaagtgcagcaacaggaggattaaagattacagccaacgagccagcgcaaacccgagagttaagaaatcggatctttccaaccctgtatgccatcttccagcagagtcggggtcaagagcaggaactgaaaataaaaaaccgatctctgcgttcgctcaccagaagttgtttgtatcacaagagcgaagatcaacttcagcgcactctcgaggacgccgaggctctcttcaacaagtactgcgcgctgactcttaaagagtaggcagcgaccgcgcttattcaaaaaaggcgggaattacatcatcctcgacatgagtaaagaaattcccacgccttacatgtggagttatcaaccccaaatgggattggcggcaggcgcctcccaggactactccacccgcatgaattggctcagcgccgggccttctatgatttctcgagttaatgatatacgcgcctaccgaaaccaaatacttttggaacagtcagctcttaccaccacgccccgccaacaccttaatcccagaaattggcccgccgccctagtgtaccaggaaagtcccgctcccaccactgtattacttcctcgagacgcccaggccgaagtccaaatgactaatgcaggtgcgcagttagctggcggctccaccctatgtcgtcacaggcctcggcataatataaaacgcctgatgatcagaggccgaggtatccagctcaacgacgagtcggtgagctctccgcttggtctacgaccagacggaatctttcagattgccggctgcgggagatcttccttcacccctcgtcaggctgttctgactttggaaagttcgtcttcgcaaccccgctcgggcggaatcgggaccgttcaatttgtggaggagtttactccctctgtctacttcaaccccttctccggatctcctgggcattacccggacgagttcataccgaacttcgacgcgattagcgagtcagtggacggctacgattgatgtctggtgacgcggctgagctatctcggctgcgacatctagaccactgccgccgctttcgctgctttgcccgggaactcattgagttcatctacttcgaactccccaaggatcaccctcaaggtccggcccacggagtgcggatttctatcgaaggcaaaatagactctcgcctgcaacgaattttctcccagcggcccgtgctgatcgagcgagaccagggaaacaccacggtttccatctactgcatttgtaatcaccccggattgcatgaaagcctttgctgtcttatgtgtactgagtttaataaaaactgaattaagactctcctacggactgccgcttcttcaacccggattttacaaccagaagaacgaaacttttcctgtcgtccaggactctgttaacttcacctttcctactcacaaactagaagctcaacgactacaccgcttttccagaagcattttccctactaatactactttcaaaaccggaggtgagctccaaggtcttcctacagaaaacccttgggtggaagcgggccttgtagtgctaggaattcttgcgggtgggcttgtgattattctttgctacctatacacaccttgcttcactttcttagtggtgttgtggtattggtttaaaaaatggggcccatactagtcttgcttgttttactttcgcttttggaaccgggttctgccaattacgatccatgtctagacttcgacccagaaaactgcacacttacttttgcacccgacacaagccgcatctgtggagttcttattaagtgcggatgggaatgcaggtccgttgaaattacacacaataacaaaacctggaacaataccttatccaccacatgggagccaggagttcccgagtggtacactgtctctgtccgaggtcctgacggttccatccgcattagtaacaacactttcattttttctgaaatgtgcgatctggccatgttcatgagcaaacagtattctctatggcctcctagcaaggacaacatcgtaacgttctccattgcttattgcttgtgcgcttgccttcttactgctttactgtgcgtatgcatacacctgcttgtaaccactcgcatcaaaaacgccaataacaaagaaaaaatgccttaacctctttctgtttacagacatggcttctcttacatctctcatatttgtcagcattgtcactgccgctcatggacaaacagtcgtctctatccctctaggacataattacactctcataggacccccaatcacttcagaggtcatctggaccaaactgggaagcgttgattactttgatataatctgcaacaaaacaaaaccaataatagtaacttgcaacatacaaaatcttacattgattaatgttagcaaagtttacagcggttactattatggttatgacagatacagtagtcaatatagaaattacttggttcgtgttacccagttgaaaaccacgaaaatgccaaatatggcaaagattcgatccgatgacaattctctagaaacttttacatctcccaccacacccgacgaaaaaaacatcccagattcaatgattgcaattgttgcagcggtggcagtggtgatggcactaataataatatgcatgcttttatatgcttgtcgctacaaaaagtttcatcctaaaaaacaagatctcctactaaggcttaacatttaatttctttttatacagccatggtttccactaccacattccttatgcttactagtctcgcaactctgacttctgctcgctcacacctcactgtaactataggctcaaactgcacactaaaaggacctcaaggtggtcatgtcttttggtggagaatatatgacaatggatggtttacaaaaccatgtgaccaacctggtagatttttctgcaacggcagagacctaaccattatcaacgtgacagcaaatgacaaaggcttctattatggaaccgactataaaagtagtttagattataacattattgtactgccatctaccactccagcaccccgcacaactactttctctagcagcagtgtcgctaacaatacaatttccaatccaacctttgccgcgcttttaaaacgcactgtgaataattctacaacttcacatacaacaatttccacttcaacaatcagcattatcgctgcagtgacaattggaatatctattcttgtttttaccataacctactacgcctgctgctatagaaaagacaaacataaaggtgatccattacttagatttgatatttaatttgttctttttttttttatttacagtatggtgaacaccaatcatggtacctagaaatttcttcttcaccatactcatttgtgcatttaatgtttgcgctactttcacagcagtagccacagcaaccccagactgtataggagcatttgcttcctatgcactttttgcttttgttacttgcatctgcgtatgtagcatagtctgcctggttattaattttttccaacttatagactggatccttgtgcgaattgcctacctgcgccaccatcccgaataccgcaaccaaaatatcgcggcacttcttagactcatctaaaaccatgcaggctatactaccaatatttttgcttctattgcttccctacgctgtctcaaccccagctgcctatagtactccaccagaacaccttagaaaatgcaaattccaacaaccgtggtcatttcttgcttgctatcgagaaaaatcagaaattcccccaaatttaataatgattgctggaataattaatataatctgttgcaccataatttcatttttgatataccccctatttgattttggctggaatgctcccaatgcacatgatcatccacaagacccagaggaacacattcccctacaaaacatgcaacatccaatagcgctaatagattacgaaagtgaaccacaacccccactactccctgctattagttacttcaacctaaccggcggagatgactgaaacactcaccacctccaattccgccgaggatctgctcgatatggacggccgcgtctcagaacagcgactcgcccaactacgcatccgccagcagcaggaacgcgcggccaaagagctcagagatgtcatccaaattcaccaatgcaaaaaaggcatattctgtttggtaaaacaagccaagatatcctacgagatcaccgctactgaccatcgcctctcttacgaacttggcccccaacgacaaaaatttacctgcatggtgggaatcaaccccatagttatcacccagcaaagtggagatactaagggttgcattcactgctcctgcgattccatcgagtgcacctacaccctgctgaagaccctatacggcctaagagacctgctaccaatgaattaaaaaatgattaataaaaaatcacttacttgaaatcagcaataaggtctctgttgaaattttctcccagcagcacctcacttccctcttcccaactctggtattctaaaccccgttcagcggcatactttctccatactttaaaggggatgtcaaattttagctcctctcctgtacccacaatcttcatgtctttcttcccagatgaccaagagagtccggctcagtgactccttcaaccctgtctacccctatgaagatgaaagcacctcccaacacccctttataaacccagggtttatttccccaaatggcttcacacaaagcccaaacggagttcttactttaaaatgtttaaccccactaacaaccacaggcggatctctacagctaaaagtgggagggggacttacagtggatgacaccaacggttttttgaaagaaaacataagtgccaccacaccactcgttaagactggtcactctataggtttaccactaggagccggattgggaacgaatgaaaataaactttgtatcaaattaggacaaggacttacattcaattcaaacaacatttgcattgatgacaatattaacaccttatggacaggagtcaaccccaccgaagccaactgtcaaatcatgaactccagtgaatctaatgattgcaaattaattctaacactagttaaaactggagcactagtcactgcatttgtttatgttataggagtatctaacaattttaatatgctaactacacacagaaatataaattttactgcagagctgtttttcgattctactggtaatttactaactagactctcatccctcaaaactccacttaatcataaatcaggacaaaacatggctactggtgccattactaatgctaaaggtttcatgcccagcacgactgcctatcctttcaatgataattctagagaaaaagaaaactacatttacggaacttgttactacacagctagtgatcgcactgcttttcccattgacatatctgtcatgcttaaccgaagagcaataaatgacgagacatcatattgtattcgtataacttggtcctggaacacaggagatgccccagaggtgcaaacctctgctacaaccctagtcacctccccatttaccttttactacatcagagaagacgactgacaaataaagtttaacttgtttatttgaaaatcaattcacaaaatccgagtagttattttgcctcccccttcccatttaacagaatacaccaatctctccccacgcacagctttaaacatttggataccattagatatagacatggttttagattccacattccaaacagtttcagagcgagccaatctggggtcagtgatagataaaaatccatcgggatagtcttttaaagcgctttcacagtccaactgctgcggatgcgactccggagtctggatcacggtcatctggaagaagaacgatgggaatcataatccgaaaacggtatcggacgattgtgtctcatcaaacccacaagcagccgctgtctgcgtcgctccgtgcgactgctgtttatgggatcagggtccacagtgtcctgaagcatgattttaatagcccttaacatcaactttctggtgcgatgcgcgcagcaacgcattctgatttcactcaaatctttgcagtaggtacaacacattattacaatattgtttaataaaccataattaaaagcgctccagccaaaactcatatctgatataatcgcccctgcatgaccatcataccaaagtttaatataaattaaatgacgttccctcaaaaacacactacccacatacatgatctcttttggcatgtgcatattaacaatctgtctgtaccatggacaacgttggttaatcatgcaacccaatataaccttccggaaccacactgccaacaccgctcccccagccatgcattgaagtgaaccctgctgattacaatgacaatgaagaacccaattctctcgaccgtgaatcacttgagaatgaaaaatatctatagtggcacaacatagacataaatgcatgcatcttctcataatttttaactcctcaggatttagaaacatatcccagggaataggaagctcttgcagaacagtaaagctggcagaacaaggaagaccacgaacacaacttacactatgcatagtcatagtatcacaatctggcaacagcgggtggtcttcagtcatagaagctcgggtttcattttcctcacaacgtggtaactgggctctggtgtaagggtgatgtctggcgcatgatgtcgagcgtgcgcgcaaccttgtcataatggagttgcttcctgacattctcgtattttgtatagcaaaacgcggccctggcagaacacactcttcttcgccttctatcctgccgcttagcgtgttccgtgtgatagttcaagtacaaccacactcttaagttggtcaaaagaatgctggcttcagttgtaatcaaaactccatcgcatctaatcgttctgaggaaatcatccacggtagcatatgcaaatcccaaccaagcaatgcaactggattgtgtttcaagcaggagaggagagggaagagacggaagaaccatgttaatttttattccaaacgatctcgcagtacttcaaattgtagatcgcgcagatggcatctctcgcccccactgtgttggtgaaaaagcacagctagatcaaaagaaatgcgattttcaaggtgctcaacggtggcttccagcaaagcctccacgcgcacatccaagaacaaaagaataccaaaagaaggagcattttctaactcctcaatcatcatattacattcctgcaccattcccagataattttcagctttccagccttgaattattcgtgtcagttcttgtggtaaatccaatccacacattacaaacaggtcccggagggcgccctccaccaccattcttaaacacaccctcataatgacaaaatatcttgctcctgtgtcacctgtagcgaattgagaatggcaacatcaattgacatgcccttggctctaagttcttctttaagttctagttgtaaaaactctctcatattatcaccaaactgcttagccagaagccccccgggaacaagagcaggggacgctacagtgcagtacaagcgcagacctccccaattggctccagcaaaaacaagattggaataagcatattgggaaccgccagtaatatcatcgaagttgctggaaatataataaggcagagtttcttgtaaaaattgaataaaagaaaaatttgccaaaaaaacattcaaaacctctgggatgcaaatgcaataggttaccgcgctgcgctccaacattgttagttttgaattagtctgcaaaaataaaaaaaaaaacaagcgtcatatcatagtagcctgacgaacagatggataaatcagtctttccatcacaagacaagccacagggtctccagctcgaccctcgtaaaacctgtcatcatgattaaacaacagcaccgaaagttcctcgcggtgaccagcatgaataattcttgatgaagcatacaatccagacatgttagcatcagttaacgagaaaaaacagccaacatagcctttgggtataattatgcttaatcgtaagtatagcaaagccacccctcgcggatacaaagtaaaaggcacaggagaataaaaaatataattatttctctgctgctgttcaggcaacgtcgcccccggtccctctaaatacacatacaaagcctcatcagccatggcttaccagacaaagtacagcgggcacacaaagcacaagctctaaagtgactctccaacctctccacaatatatatatacacaagccctaaactgacgtaatgggagtaaagtgtaaaaaatcccgccaaacccaacacacaccccgaaactgcgtcaccagggaaaagtacagtttcacttccgcaatcccaacaggcgtaacttcctctttctcacggtacgtgatatcccactaacttgcaacgtcattttcccacggtcgcaccgccccttttagccgttaaccccacagccaatcaccacacgatccacactttttaaaatcacctcatttacatattggcaccattccatctataaggtatattattgatgatg

SEQ ID NO: 148 - DNA, 34764 bp, Unknown
  Description of Unknown: Human adenovirus 14 sequence
catcatcaataatataccttatagatggaatggtgccaatatgtaaatgaggtgattttaaaaagtgtgggctgtgtggtaattggctgtggggttaacggctaaaaggggcggcgcggccgtgggaaaatgacgttttttgggggtggagtgtttttgcaagttgtcgcggtaaatgtgacgcaaacaaaggctttttttttacggaactacttagtgttcccacggtatttaacaggaaatgaggtagttttggccggatgcaagtaaaaattgttcattttcgcgcgaaaactgaatgaggaagtggttttctgaataatgcggtatttatggcagggtggagtatttgttcagggccaggtagactttgacccattacgtggaggtttcgattaccgcggaggtttcgattaccgtgttttttacctaaatttccgcgtaccgtgtgaaagtcttctgtttttacgtaggtgtcagctgatcgctacggtatttatacctcagggtttgtgtcaagaggccactcttgagtgccagcgagaagagttttctcctctgcgccggcagtttaatattaaaaaaaatgagacacttgcgatttatgcctcaggaaataatttctgctgagactggaaacgaaatactggagtttgtggtgcacgccctgatgggagacgatccggagccacctgtgcagctttttgagcctcctacgcttcaggaactgtatgatttagaggtagagggatcggaggattctaatgaggaagctgtgaatggcttttttaccgattctatgcttttagctgctaatgaaggattagaattagatccgcctttggacactttcgatactccaggggtgattgtggaaagcggtacagctgtaagaaaattacctgatttgggttccgtggactgtgatttgcactgctatgaagacgggtttcctttgagtgatgaggaggaccatgaaaaggagcagtctatgcagactgcagcgggtgagggagtgaaggctgccattggttttcagttggattgcccggagcttcctggacatggctgtaagtcttgtgaatttcacaggaaaaatactggagtaaaggaactgttatgttcgctttgttatatgagagcgcactgccactttatttacagtaagtgtgtttaagttaaaatttaaaggaatatgctgtttttcacatgtatattgagtgggaaatttgtgcttcttattataggtcctgtgtctgatgctgatgagtcaccatctcctgattctactacctcacctcctgagattcaagcacctgttcctgtggacgtgcacaagcccattcctgtaaagcttaagcctggaaaacgtccagcagtggaaaaactcgaggacttgttacagggtggggacggacctttggacttgagtacacggaaacggccaagacaataagtgttccatatccgtgtttacttaaggtgacgtcaatatttgtgtgagagtgcaatgtaataaaaatatgttaactgtgtactggtttttattgctttttgggcggggactcaggtatataagtagaagcagacctgtgtggttagctcatagaagctggctttgattcatggaggtttgggccattttggaagaccttagaaagactaggcaactgttagagaacgcttcggacggagtctccggtttttggagattctggttcgctagtgaattagctagggtagtttttaggataaaacaggactataaagaagaatttgaaaagttgttggtagattgtccaggactttttgaagctcttaatttgggccatcaagttcactttaaagaaaaagttttatcagttttagacttttcgaccccaggtagaactgccgctgctgtggcttttcttacttttatattagataaatggatcccgcagactcatttcagcaggggatacgttttggatttcgtagccacagcattgtggagaacatggaaggttcgcaagatgaggacaatcttaggttactggccagtgcagcctttgggtgtagcgggaatcctgaggcatccaccggtcatgccagcggttctggaggaggaacagcaagaggacaacccgagagccggcctggaccctccagtggaggaggcggagtagctgacttgtctcctgaactgcaacgggtgcttactggatctacgtccactggacgggataggggcgttaaaagggagagggcatctagtggtactgatgctagatctgagttggctttaagtttaatgagtcgcagacgtcctgaaaccatttggtggcatgaggtccagaaagagggaagggatgaagtttctgtattgcaggagaaatattcactggaacaggtgaaaacatgttggttggagcctgaggatgattgggaggtggccattaaaaattatgccaagatagctttgaggcctgataaacagtataagattactagacggattaatatccggaatgcttgttacatatctggaaatggggctgaggtggtaatagatactccagacaagacagttattagatgctgcatgatggatatgtggcctggagtagtcggtatggaagcagtaacttttgtaaatgttaagtttaggggagatggttataatggaatagtgtttatggccaataccaaacttatattgcatggttgtagcttttttggttttaacaatacctgtgtagatgcctggggacaggttagtgtacggggatgtagtttctatgcgtgttggattgccacagctggcagaaccaagagtcaattgtctctgaagaaatgcatattccaaagatgtaacctgggcattcttaatgaaggcgaagcaagggtccgccactgcgcttctacagatactggatgttttattttaattaagggcaatgccagcgtaaagcataacatgatttgcggtgcttccgatgagaggccttatcaaatgctcacttgtgccggagggcattgtaacatgctggctactgtgcatattgtttctcatcaacgcaaaaaatggcctgtttttgatcacaatgtgttgaccaagtgtaccatgcatgcaggtgggcgtagaggaatgtttatgccttaccagtgtaacatgaatcatgtaaaagtgttgttggaaccagatgccttttccagaatgagtctaacaggaatgtttgacatgaacatgcaaatctggaagatcctgaggtatgatgatacaagatcgagggtgcgcgcatgcgaatgcggaggcaagcatgccaggttccagccggtgtgtgtagatgtgactgaagatctgagaccggatcatttggttattgcccgcactggagcagagttcggatccagtggagaagaaactgactaaggtgagtattgggaaaactttggggtgggattttcagatggacagattgagtaaaaatttgtttttctgtcttgcagctgtcatgagtggaaacgcttcttttaatgggggagtcttcagcccttatctgacagggcgtctcccatcctgggcaggagttcgtcagaatgttatgggatctactgtggatggaagacccgtccaacccgccaattcttcaacgctgacctatgctactttaagttcttcacctttggacgcagctgcagccgccgctgccgcctctgttgccgctaacactgtgcttggaatgggttactatggaagcatcctggctaattccacttcctctaataacccttctaccctgactcaggacaagttacttgtccttttggcccagctggaggctttgacccaacgtctgggtgaactttctcagcaggtggccgagttgcgagtacaaactgagtctgctgtcggcacggcaaagtctaaataaaaaaaaaaaattccagaatcaatgaataaataaacgagcttgttgttgatttaaaatcaagtgttttttatttcatttttcgcgcacggtatgccctagaccaccgatctcgatcattgagaacacggtggattttttccaaaatcctataaaggtgggattgaatgtttagatacatgggcattaggccgtctttggggtggagatagctccattgaagggattcatgctccggggtagtgttgtaaattacccagtcataacaaggtcgctgtgcatggtgttgcacaatatcttttagaagtaggctgattgccacagataagcccttggtgtaggtgtttacaaaccggttgagctgggaggggtgcattcggggtgaaattatgtgcattttggattggatttttaagttggcaatattgccgccaagatctcgtcttgggttcatgttatgaagtaccaccaagacggtgtatccggtacatttaggaaatttatcgtgcagcttggatggaaaagcgtggaaaaatttggagacacccttgtgtcctccgagattttccatgcactcatccatgataatagcaatagggccgtgggcagcagcgcgggcaaacacgttccgtgggtctgacacatcatagttatgttcctgagttaaatcatcataggccattttaataaatttgggacggagagtacccgattggggtatgaatgttccttcgggccccggagcatagttcccctcacagatttgcatttcccaagctttcagttccgagggtggaatcatgtccacctggggggctataaagaacaccgtttctggggctggggtaattagttgggatgatagcaagtttctgagcaattgagatttgccacatccggtggggccataaatgattccgattacaggttgcagttggtagtttagggaacggcaactgccgtcttctcgaagcaagggggccacctcgttcatcatttcccttacatgcatattttcccgcaccaaatccattaggaggcgctctcctcctagtgatagaagttcttgtagtgaggaaaagtttttcagcggttttagaccgtcagccatgggcattttggagagagtctgttgcaaaagttctagtctgttccacagttcagtgatgtgttctatggcatctcgatccagcagacctcctcgtttcgcgggtttggacggctcctggagtagggtatgagacgatgggcgtccagcgctgccagggttcggtccttccagggtctcaaagttcgggtcagggttgtttccgtcacagtgaaggggtgtgcgcctgcttgggcgcttgccagggtgcgcttcagactcatcctgctggtcgaaaacttgtgccgcttggcgccctgtatgtcggccaagtagcagtttaccatgagttcgtagttgagcgcctcggctgcgtggcccttggcgcggagcttacctttggaagttttcttgcataccgggcagtataggcatttcagcgcatacagcttgggcgcaaggaaaatggattctggggagtatgcatccgcgccgcaggaggcgcaaacagtttcacattccaccagccaggttaaatccggttcattggggtcaaaaacaagttttccgccatattttttgatgcgtttcttacctttggtctccatgagttcgtgtcctcgttgagtgacaaacaggctgtccgtgtccccgtagactgattttacaggcctcttttccagtggagtgcctcggtcttcttcgtataggaactctgaccactctgatacaaaggcgcgcgtccaggccagcacaaaggaggctatgtgggaggggtagcgatcgttgtcaaccagggggtccaccttttccaaagtatgcaaacacatgtcactctcttcaacatccaggaatgtgattggcttgtaggtgtatttcacgtgacctggggtcccagctgggggggtataaaagggggcggttctctgctcttcctcactgtcttccggatcgctgtccaggaacgtcagctgttggggtaggtattccctctcgaaggcgggcatgacctctgcactcaggttgtcagtttctaagaacgaggaggatttgatattgacagtgccgcttgagatgcctttcatgaggttttcgtccatttggtcagaaaacacaatttttttattgtcaagtttggtggcaaatgatccatacagggcgttggataaaagtttggcaatggatcgcatggtttggttcttttccttgtccgcgcgctctttggcagcgatgttgagttggacatattcgcgtgccaggcacttccattcggggaagatagttgtcaattcatctggcacaattctcacttgccaccctcggttatgcaaggtaattaaatccacactggtggccacctcgcctcgaaggggttcgttggtccagcagagcctacctcctttcctagaacagaaaggtggaagtgggtctagcataagttcatcgggagggtctgcatccatggtaaagattccaggaagtaaatccttatcaaaatagctgatgggagtggggtcatctaaggccatttgccattctcgagctgccagtgcgcgctcatatgggttaaggggactgccccagggcatgggatgggtgagtgcagaggcatacatgccacagatgtcatagacgtagatgggatcctcaaagatgcctatgtaggttggatagcatcgcccccctctgatacttgctcgcacatagtcatatagttcatgtgacggcgctagcagccccggacccaagttggtgcgattgggtttttctgttctgtagacaatctggcgaaagatggcgtgagaattggaagagatggtgggtctttgaaaaatgttgaagtgggcatgaggtagacctacagagtctctgataaagtgggcataagattcttcaagcttggttaccagttgggcggtgacaagtacgtccagggcgcagtagtcaagtgtttcttgaatgatgtcataacctggttggtttttcttttcccacagttcgcggttgagaaggtattcttcgcgatccttccagtactcttctagcggaaacccgtctttgtctgcacggtaagatcctagcatgtagaactgattaactgccttgtaagggcagcagcccttctctacgggtagagagtatgcttgagcagcttttcgtagcgaagcgtgagtaagggcgaaggtgtctctaaccatgactttgacaaattggtatttaaagtccatgtcgtcacaggctccctgttcccagagttggaagtctacccgtttcttgtaggcggggttgggcaaagcgaaagtaacatcgttgaagagaatcttaccggctctgggcataaaattgcgagtgatgcgaaaaggctgtggtacttccgctcgattgttgatcacctgggcagctaggacgatctcgtcgaagccgttgatgttgtgtcctacaatgtataattctatgaaacgcggcgtgcctctgacgtgaggtagcttattgagctcatcaaaggttaggtctgtagggtcagataaggcgtagtgttcaagggcccattcgtgcagatgaggatttgcatgtaggaatgatgaccaaagatccaccgccagtgctgtttgtaactggtcccgatactgacgaaaatgctggccaattgccattttttctggagtgacacagtagaaggttccgggatcttgttgccatcgatcccacttaagtttaatggctagatcgtgggccatgttgacgagacgctcttctcctgagagtttcatgaccagcatgaaaggaactagttgtttgccaaaggaccccatccaggtgtaagtttccacatcgtaggtcaggaagagtctttctgtgcgaggatgagagccgattgggaaaaactggatttcctgccaccagttggaggattggctgttgatgtgatggaagtagaagtttctgcggcgcgccgagcattcgtgtttgtgcttgtacagacggccgcagtagtcgcagcgttgcacgggttgtatctcgtgaatgagctgtacctggcttcccttgacgagaaatttcagtgggaagccgaggcctggcgattgtatctcgtgctcttctatattcgctgtattggcctgttcatcttctgtttcgatggtggtcatgctgacgagcccccgcgggaggcaagtccagacctcggcgcgggaggggcggagctgaaggacgagagcgcgcaggctggagctgtccagagtcctgagacgctgcggactcaggttagtaggtagggacagaagattaacttgcatgatcttttccagggcgtgcgggaggtttagatggtacttgatttccacaggttcgtttgtagagacgtcaatggcttgcagggttccgtgtcctttgggtgccactaccgtacctttgttttttcttttgatcggtggtggctctcttgcttcttgcatgcttaaaagcggtgacggggacgcgcgccgggcggcagcggttgttccggacccgggggcatggctggtagtggcacgtcggcgccgcgcacgggcaggttctggtactgcgctctgagaagacttgcgtgcgccaccacgcgtcgattgacgtcttgtatctgacgtctttgggtgaaagctaccggccccgtgagcttgaacctgaaagagagttcaacagaatcaatttcggtatcgttaacggcagcttgtctcagtatttcttgtacgtcaccagagttgtcctggtaggcgatctccgccatgaactgctcgatttcttcctcctgaagatctccgcgacccgctctctcgacggtggccgcgaggtcattggagatacggcccatgagttgggagaatgcattcatgcccgcctcgttccagacgcggctgtaaaccacggccccctcggagtctcttgcgcgcatcaccacctgagcgaggttaagctccacgtgtctggtgaagaccgcatagttgcataggcgctgaaaaaggtagttgagtgtggtggcgatgtgttcggcgacaaagaaatacatgatccatcgtctcagcggcatttcgctgacatcgcccagagcttccaagcgctccatggcctcgtagaagtccacggcaaaattaaaaaactgggagtttcgcgcggacacggtcaattcctcctcgagaagacggatgagttcggctatggtggcccgtacttcgcgttcgaaggctcccggcatctcttcttcctcttctatctcttcttccactaacatctcttcttcgtcttcaggcgggggcggagggggcacgcggcgacgtcgacggcgcacgggcaaacggtcgatgaatcgttcaatgacctctccgcggcggcggcgcatggtttcagtgacggcgcggccgttctcgcgcggtcgcagagtaaaaacaccgccgcgcatctccttaaagtggtgactgggaggttctccgtttgggagggaaagggcgctgattatacattttattaattggcccgtagggactgcgcgcagagatctaatcgtgtcaagatccacgggatctgaaaacctttcaacgaaagcgtctaaccagtcacagtcacaaggtaggctgagtacggcttcttgtgggcgggggtggttatgtgttcggtctgggtcttctattccttcttcatctcgggaaggtgagacgatgctgctggtgatgaaattaaagtaggcagttctaagacggcggatggtggcgaggagcaccaggtctttgggtccggcttgctggatacgcaggcgattggccattccccaagcattatcctgacatctagccagatctttgtagtagtcttgcatgagccgttctacgggcacttcttcttcacccgttctgccatgcatacgtgtgagtccaaacccgcgcattggttggaccagtgccaagtcagctacaactctttcggcgaggatggcttgctgtacttgggtgagggtggcttgaaagtcatcaaaatccacgaagcggtggtaagccccggtattgatggtgtaagcacagttggccatgactgaccagttaactgtttggtgaccatggcgcacgagctcggtgtatttaaggcgcgaataggcgcgggtgtcaaaaatgtaatcgttgcaggtgcgcaccagatactggtaccctataagaaaatgcggtggtggttggcggtagagaggccattgttctgtagctggagcgccgggggcgaggtcttccaacataaggcggtgatagccgtagatgtacctggacatccaggtgattcctgcggcggtagtggaagcccgaggaaactcgcgtacgcggttccaaatgttgcgtagcggcatgaagtagttcattgtaggcacggtttgaccagtgaggcgcgcgcagtcattgatgctctatagacacgaagaaaatgaaagcgttcagcgactcgactctgtagcctggaggaacgtgaacgggttgggtcgcggtgtaccccggttcaagacttgtactcgagccggccggagccgcggctaacgtggtattggcactcccgtctcgacccagcctacaaaaatccaggatacggaatcgagtcgttttgctggttgctgaatggcagggaagtgagtcctatttttttttttgccgctcagatgcatcccgtgctgcgacagatgcgtccccaacaacagcccccctcgcagcagcagcaaccacaaaaggctgtccctgcaactactgcaactgccgccgtgagcggtgcgggacagcccgcctatgatctggacttggaagagggcgaaggactggcacgtctaggtgcgccctcgcccgagcggcatccgcgagttcaactgaaaaaagattctcgcgaggcgtatgtgccccaacagaacctatttagagacagaagcggcgaggagccggaggagatgcgagcttcccgctttaacgcgggtcgtgagctgcgtcacggtttggaccgaagacgagtgttgcgggacgaggatttcgaagttgatgaagtgacagggatcagtcctgccagggcacacgtggctgcagccaaccttgtatcggcttacgagcagacagtaaaggaagagcgtaacttccaaaagtcttttaataatcatgtgcgaaccctgattgcccgcgaagaagttactcttggtttgatgcatttgtgggatttgatggaagctatcattcagaaccctactagcaaacctctgaccgcacagctgtttctggtggtgcaacacagcagagacaacgaggctttcagagaggcactgctcaacatcactgaacccgaggggagatggttgtatgatcttatcaacattctacagagtatcatagtgcaggagcggagcctgggcctggccgaaaaggtggctgccatcaattactcggttttaagtttgggaaaatattacgctcgcaagatctacaagactccatacgttcccatagacaaggaggtgaagatagatgggttctacatgcgtatgacgctcaaggtcttgaccctgagcgatgatcttggggtgtaccgcaatgacagaatgcatcgcgccgttagcgccagtaggaggcgcgagttaagcgacagggaactgatgcacagtttgcaaagagctctgactggagctggaacagagggtgagaattactttgacatgggagctgacttgcagtggcagcctagtcgcagggctctgagcgccgcgacggcaggatgtgagcttccttacatagaagaggcggatgaaggcgaggaggaagagggcgagtacttggaagactgatggcacaacccgtgttttttgctagatggaacagcaagcaccggatcccgcaacgcgggcggcgctgcagagccagccgtccggcattaactcctcggacgattggacccaggccatgcaacgtatcatggcgttgacgactcgcaaccccgaagcctttagacagcaaccccaggccaaccgtctatcggccatcatggaagctgtagtgccttcccgctctaatcccactcatgagaaggtcctggccattgtaaacgcgttggtggagaacaaagctattcgtccagatgaggccggactggtatacaacgctcttttagaacgcgtggctcgctacaacagtagcaatgtgcaaaccaatttggaccgtatgataacagatgtacgcgaagccgtgtctcagcgtgaaaggttccagcgcgatgccaaccttggttcgctggtggcgttaaatgcttttttgagtactcagcctgctaatgtgccgcgtggtcaacaggattatactaactttttgagtgcgttgagactgatggtatctgaagtacctcagagcgaagtgtatcagtccggacctgactacttctttcagactagcagacagggtttgcagacggtaaatctgagccaagcttttaaaaaccttaaaggtttgtggggagtgcatgccccggtaggagaaagagcaaccgtgtctagcttgttaactccaaactcccgcctattactactgttggtagctcctttcaccgacagcggcagcatcgaccgtaattcctatttgggttacctactaaacctgtatcgcgaagccatagggcaaagccaggtggacgagcagacctatcaagaaattacccaagtcagtcgcgctttgggtcaggaagacactggcagtttggaagccactctgaacttcttgcttaccaatcggtctcagaagatccctcctcaatatgctcttactgcggaggaggagaggatccttagatatgtgcagcagagcgtgggattgtttctgatgcaagagggggcaactccgactgcggcattggacatgacagcgcgaaatatggagcccagcatgtatgccagtaaccggcctttcattaacaaactgctggactacttgcacagagctgccgctatgaactctgattattttaccaatgccatcctaaacccgcactggctgcccccacctggtttctacacgggcgaatatgacatgcccgaccctaatgacgggtttctgtgggacgacgtggacagtaatgttttttcacctctttttgatcatcgcacgtggaaaaaggaaggcggcgatagaatgcattcttctgcatcgctgtccggggtcatgggtgctaccgcggctgagcccgagtctgcaagtccttttcctagtctacccttttctctacacagtgtacgtagcagcgaagtgggtagaataagtcgcccgagtttaatgggcgaagaggaatacctaaacgattccttgctcagaccggcgagagaaaaaaatttcccaaacaatggaatagaaagtttggtggataagatgagtagatggaagacttatgctcaggatcacagagacgagcctgggatcatggggactacaagtagagcgagccgtagacgccagcgtcatgacagacagaggggtcttgtgtgggaagatgaggattcggccgatgatagcagcgtgttggacttgggtgggagaggaaggggcaacccgtttgctcatttgcgccctcgcttgggtggtatgttgtaaaaaaaaaataaaaaggaaaactcaccaaggccatggcgacgagcgtacgttcgttcttctttattatttgtgtctagtataatgaggcgagtcgtgctaggcggagcggtggtgtatccggagggtcctcctccttcgtacgagagcgtgatgcagcagcagcaggcgacggcggtgatgcaatccccactggaggctccctttgtacctccgcgatacctggcacctacggagggcagaaacagcattcgttactcggaactggcacctcagtacgataccaccaggttgtatctggtggacaacaagtcggcggacattgcttctctgaactatcagaatgaccacagcaacttcttgaccacggtggtgcagaacaatgactttacccctacggaagccagtacccagaccattaactttgatgaacgatcgcggtggggcggtcagctaaagaccatcatgcatactaacatgcccaacgtaaacgagtatatgtttagtaacaacttcaaagcgcgtgtgatggtgtccagaaaacctcccgaaggtgctgcagttggggatacatatgatcacaagcaggatattttggaatatgagtggttcgagtttactttgccagaaggcaacttttcagttactatgaccattgatttgatgaacaatgccatcatagataactacttgaaagtgggcagacagaatggagtgcttgaaagtgacattggtgttaagttcgacaccaggaacttcaagctgggatgggatcccgaaaccaagttgattatgcctggagtgtatacgtatgaagcctttcatcctgacattgtcttactgcctggctgtggagtggactttaccgaaagtcgtttgagcaaccttcttggtatcagaaaaaaacagccatttcaagagggttttaagattttgtatgaagatttagaaggaggtaatattccggccctcttggatgtagatgcctatgagaacagtaagaaagaacaaaaagccaaaatagaagctgctgcggaagctaaggcaaacatagttgccagcgactttacaagggttgctaacgctggagaggtcagaggagacaattttgcaccaacacctgttccgactgcagaatcattattggccgatgtaactggaggaacggacgtgaaactcactattcaacctgtagaaaaagatagtaagaatagaagctataatgtgttggaagataaaatcaacacagcctatcgcagttggtacctttcgtacaattatggcgatcccgaaaaaggagtgcgttcctggacattgctcaccacctcagatgtcacctgcggagcagagcaggtctactggtcgcttccagacatgatgcaggatcctgtcactttccgctccactagacaagtcagcaactaccctgtggtgggtgcagagcttatgcccgtcttctcaaagagcttctacaacgaacaagctgtgtactcccagcagctccgccagtccacctcgcttacgcacgtcttcaaccgctttcctgagaaccagattttaatccgtccgccggcgcccaccattaccaccgtcagtgaaaacgttcctgctctcacagatcacgggaccctgccgttgcgcagcagtatccggggagtccaacgtgtgaccgttactgacgccagacgccgcacctgtccctacgtgtacaaggcactgggcatagtcgcaccgcgcgtcctttcaagccgcactttctaaaaaaatgtccattcttatctcgcccagtaataacaccggttggggtctgcgcgctccaagcaagatgtacggaggcgcacgcaaacgttctacccaacatcccgtgcgtgttcgcggtcattttcgcgctccatggggtgccctcaagggccgcactcgcgttcgaaccaccgtcgatgatgtaatcgatgaggtggttgccgacgcccgtaattatactcctactgcgcctacatctactgtggatgcagttattgacagtgtagtggctgacgctcgcaactatgctcgacgtaagagccggcgaaggcgcattgccagacgccaccgagctaccactgccatgcgagccgcaagagctctgctacgaagagctagacgcgtgggacgaagagccatgcttagggcggccagacgtgcagcttcgggcgccagcgccggcaggtcccgcaggcaagcagccgctgtcgcagcggcgactattgccgacatggcccaaacgcgaagaggcaatgtatactgggtgcgtgacgctgccaccggtcaacgtgtacccgtgcgcacccgtccccctcgcacttagaagatactgagcagtctccgatgttgtgtcccagcggcgaggatgtccaagcgcaaatacaaggaagaaatgctgcaggttatcgcacctgaagtctacggccaaccgctgaaggatgaaaaaaaaccccgcaaaatcaagcgggctaaaaaggacaaaaaagaagaggaagatggcgatgatgggctggcggagtttgtgcgcgagtttgccccacggcgacgcgtgcaatggcgtggacgcaaagttcgacatttgttgagacctggaacttcggtggtctttacacccggcgagcgttcaagcgctacttttaagcgttcctatgatgaggtgtacggggatgatgatattcttgagcaggcggctgaccgattaggcgagtttgcttatggcaagcgtagtagaataaatcccaaggatgagacagtgtccatacccttggatcatggaaatcccacccctagtcttaaaccggtcactttgcagcaagtgttacccgtaactccgcgaacaggtgttaaacgcgaaggtgaagatttgtatcccactatgcaactaatggtacccaaacgccaaaagttggaggacgttttggagaaagtaaaagtggatccagatattcaacctgaggttaaagtgagacccattaagcaggtagcgcctggtctgggagtacaaactgtagacattaagattcccactgaaagtatggaagtgcaaactgaacccgcaaagcctactgccacctccactgaagtgcaaacggatccatggatgccgatgcctattacaactgacgccgccggtcccactcgaagatcccgacgaaagtacggtccagcaagtctgttgatgcccaactatgttgtacacccatctattattcctactcctggttaccgaggcactcgctactatcgcagccgaaacagtacctcccgccgtcgccgcaagacacctgcaaatcgcagtcgtcgccgtagacgcacaagcaaaccgactcccggcgccctggtgcggcaagtgtaccgcaatagtagtgcggaacctttgacactgccgcgtgcgcgttaccatccaagtatcatcacttaatcaatgttgccgctgcctccttgcagatatggccctcacttgtcgccttcgcgttcccatcactggttaccgaggaagaaattcgcgccgtagaagagggatgttggggcgcggaatgcgacgctacaggcgacggcgtgctatccgcaagcaattgcggggtggttttttgccagccttaattccaattatcgctgctgcaattggcgcgataccaggcatagcttccgtggcggttcaggcctcgcaacgacattgacattggaaaaaaaagtataaataaaaaaaaaaatacaatggactctgacactcctggtcctgtgactatgttttcttagagatggaaaacatcaatttttcatccttggctccgcgacacggcacgaagccgtacatgggcacctggagcgacatcggcacgagccaactgaacgggggcgccttcaattggagcagtatctggagcgggcttaaaaattttggctcaaccataaaaacatacgggaacaaagcttggaacagcagtacaggacaggcgcttagaaataaacttaaagaccagaactttcaacaaaaagtagtcgatgggatagcttccggcatcaatggagtggtagatttggctaatcaggctgtgcagaaaaagataaacagtcgtttggacccgccgccagcaaccccaggtgaaatacaagtggaggaagaaattcctccgccagaaaaacgaggcgacaagcgtccgcgtcccgatttggaagagacgctggtgacgcgcgtagatgaaccgccttcttatgaggaagcaacgaagcttggaatgcccaccactagaccgatagcccctatggctaccggggtaatgaaaccttctcagttgcatcgacccgtcactttggatttgccccctccccctgctgctactgctgtacccgcttctaagcctgtcgctgccccgaaaccagtcgccgtagccaggtcacgtcccgggggcgctcctcgtccaaatgcgcactggcaaaatactctgaacagcatcgtgggtctaggcgtgcaaagtgtaaaacgccgtcgctgcttttaattaaatatggagtagcgcttaacttgcctatctgtgtatatgtgtcattacacgccgtcacagcagcagaggaaaaaaggaagaggtcgtgcgtcgacgctgagttactttcaagatggccaccccatcgatgctgccccagtgggcatacatgcacatcgccggacaggatgcttcggagtacctgagtccgggtctggtgcagttcgcccgcgccacagacacctacttcaatctgggaaataagtttagaaatcccaccgtagcgccaacccacgatgtgaccaccgaccgtagccagcggctcatgttgcgcttcgtgcccgttgaccgggaggacaatacatactcttacaaagtgcggtacaccctggccgtgggcgacaacagagtgctggatatggccagcacgttctttgacattaggggcgtgttggacagaggtcccagtttcaaaccctattctggtacggcttacaactctctggctcctaaaggcgctccaaatgcatctcagtggttggataaaggggttgaaactactgaagaacggcaaaatgaagacggggaaaatgacgaaaaagctacatacacttttggcaatgccccagtaaaagccgatgctgacattacaaaagacggactaccaataggtttggaagtcccagctgaaggtgaccctaaacctatctacgctaataagctttaccaaccagaaccccaggtgggacaggaatcgtggactgatacagatggcactgaagaaaaatacggaggcagagtacttaaaccggacactaaaatgaaaccgtgctatgggtcttttgctaaacctactaatgtgaaaggcggacaggcaaaagtgaaaacagaagaaggcaacaacattgaatatgacattgacatgaacttttttgacttaagatcacaaaaacaaggtcttaaacctaagattgtaatgtatgcagaaaatgtggacctggaatctccagatactcatgttgtgtacaaacctgaagtttcagatgctagttcaaatgctaatcttggacagcagtctatgcccaacagacccaactacattggcttcagagataattttattggtcttatgtactataacagtactggtaacatgggggtgctggctggccaagcatctcagttgaatgcagtggttgacttgcaggacagaaacacagaactgtcttaccaactcttgcttgactccctgggcgatagaaccagatactttagcatgtggaatcaggctgttgacagttatgatcccgatgtgcgtgttattgaaaatcatggtgtggaagatgaacttcccaactactgttttccactggacggcatcggtccgcgaacagatagttacaaggagattcagttaaatggagaccaagcttggaaagatgtaaatccaaatggtatcagtgaacttgttaagggaaatccatttgccatggaaattaaccttcaagccaatctatggcgaagtttcctttattccaatgtggctctgtatctcccagactcgtacaaatacaccccgtccaatgtcactcttccagaaaacaaaaacacctacgactacatgaacgggcgggtggtgccgccatctctagtagacacctatgtgaacattggcgccaggtggtctctggatgctatggacaatgtcaacccattcaaccaccaccgtaacgctggcttgcgttaccgatccatgcttttgggtaacggacgttatgtgcctttccacatacaagtgcctcaaaaattcttcgctgtcaaaaacctgctgcttctcccaggctcctacacttatgagtggaacttcaggaaggatgtgaacatggtgctacagagttccctcggtaacgacctacgggtagatggcgccagcatcagtttcacgagcatcaacctctatgctacctttttccccatggctcacaacaccgcttccacccttgaagccatgctgcggaatgacaccaatgatcagtcattcaacgactatctatctgcagctaacatgctctatcccattcctgccaatgcaaccaatattcccatttccattccttctcgcaactgggcggctttcagaggctggtcatttaccagactcaaaaccaaagaaactccctctttggggtctggatttgacccctactttgtctattctggttctattccctacctggatggtaccttctacctgaaccacacttttaagaaggtttccatcatgtttgactcttcagtgagctggcctggaaatgacaggttactatctcccaacgaatttgaaataaagcgcactgtggatggcgaaggctacaatgtagcccaatgcaacatgaccaaagactggttcttggtacagatgctcgccaactacaacataggctatcagggcttctacattccagaaggatacaaagatcgcatgtattcatttttcagaaacttccagcccatgagcaggcaggtggttgatgaggtcaattacaaagacttcaaggccgtcgccataccctaccaacacaacaactctggctttgtgggttacatggctccgaccatgcgccaaggtcaaccctatcccgctaactatccctatccactcattggaacaactgccgtaaatagtgttacgcagaaaaagttcttgtgtgacagaaccatgtggcgcataccgttctcgagcaacttcatgtctatgggggcccttacagacttgggacagaacatgctttatgccaactcagctcatgctctggacatgacctttgaggtggatcccatggatgagcccaccctgctttatcttctcttcgaagttttcgacgtggtcagagtgcatcagccacatcgcggcatcatcgagacagtctacctgcgtacaccgttctcggccggtaacgctaccacgtaaaaagcttcttgcttcttgcaaacagcagctgcaaccatggcctgcggatcccaaaacggctccagcgagcaagagctcagagccattgtccaagacctgggttgcggaccctattttttgggaacctacgataagcgcttcccggggttcatggcccccgataagctcgcctgtgccattgtaaacacggccggacgtgagacggggggagagcactggttggctttcggttggaacccacgttctaacacctgctacctttttgatccttttggattctcggatgatcgtcttaaacagatttaccagtttgaatatgagggtctcctgcgccgcagcgctcttgctaccaaggaccgctgtattacgctggaaaaatctacccagaccgtgcagggcccccgttctgccgcctgcggacttttctgctgcatgttccttcatgcctttgtgcactggcctgaccgtcccatggacggaaaccccaccatgaaattgctgactggagtgccaaacaacatgcttcattctcctaaagtccagcccaccctgtgtgacaatcaaaaagcactctaccattttctcaatacccattcgccttattttcgctcccatcgtacacacatcgaaagggccactgcgttcgaccgtatggatgtgcaataatgactcatgtaaacaacgtgttgaataaacagcactttattttttacacgtatcaaggctctggattacttatttatttacaagtcgaatgggttctgacgagaatcagaatgacccgcgggcagtgatacgttgcggaactgatacttgggttgccacttgaattcgggaatcaccaacttgggaaccggtatatcgggtaggatgtcactccacagctttctggtcagctgcaaagctcccagcaggtcaggagccgaaatcttgaaatcacaattaggaccagtgctctgagcgcgagagttgcggtacaccggattgcagcactgaaacaccatcagcgacggatgtctcacgcttgccagcacggtgggatctgcaatcatgcccacatccagatcttcagcattggcaatgctgaacggggtcatcttgcaggtctgcctacccatggcgggcacccaattaggcttgtggttgcaatcgcagtgcagggggattagtatcatcttggcctgatcctgtctgattcctggatacacggctctcatgaaagcatcatattgcttgaaagcctgctgggctttactaccctcggtatagaacatcccgcaggacctgctcgaaaactggttagctgcgcagccggcatcattcacacagcagcgggcgtcattgttggctatttgcaccacacttctgccccagcggttttgggtgattttggttcgctcgggattctccttcaaggctcgttgtccattctcgctggccacatccatctcgataatctgctccttctgaatcataatagtgccatgcaggcacttcagcttgccctcataatcattgcagccatgaggccacaacgcacagcctgtacattcccaattatggtgggcgatctgagaaaaagaatgtatcattccctgcagaaatcttcccatcatcgtgctcagtgtcttgtgactagtgaaagttaactggatgcctcggtgctcctcgtttacgtactggtgacagatgcgcttgtattgttcgtgctgctcaggcattagtttaaaagaggttctaagttcgttatccagcctgtacttctccatcagtacacacatcacttccatgcccttctcccaagcagacaccaggggcaagctaatcggattcttaacagtacaggcagcagctcctttagccagaggatcatctttggcaatcttttcaatgcttcttttgccatccttctcaacgatgcgcacgggcgggtagctgaaacctactgctacaagctgcgcctcttctctttcttcttcgctgtcttgactgatgtcttgcatgggaacatgtttggtcttccttggcttctttttggggggtatcgggggaggaggactgtcgctccgttccggagacagggaggattgtgaagtttcgctcaccattaccaactgactgtcggtagaagaacctgaccccacacggcgacaggtgtttctcttcgggggcagaggtggaggcgattgcgaagggctgcggtccgacctggaaggcggatgactggcagaaccccttccgcgttcgggggtgtgctccctgtggcggtcgcttaactgatttccttcgcggctggccattgtgttctcctaggcagagaaacaacagacatggaaactcagccattgctgtcaacatcgccacaagtgccatcacatctcgtcgtcagcgacgaggaaaaggagcagagcttaaccattccaccgcccagtcctgccaccacctctaccctagaagataaggaggtcgacgcatctcatgacatgcagaataaaaaagcgaaagagtctgaaacagacatcgagcaagacccgggctatgtgacaccggtggaacacgaggaagagttgaaacgctttctagagagagaggatgaaaactgcccaaaacagcaagcggataactatcaccaagatgctggaaatagggatcagaacaccgactacctcatagggcttgacggggaagacgcgctccttaaacatctagcaagacagtcactcatagtcaaggatgcattattggacagaactgaagtgcccatcagtgtggaagagctcagccgcgcctacgagcttaaccttttttcacctcgtactccccccaaacgccagccaaacggcacctgcgagccaaatcctcgcttaaacttttatccagcttttgctgtgccagaagtactcgctacttatcacatcttttttaaaaatcaaaaaattccagtctcctgccgcgctaatcgcacccgcgctgacgccctacttaatctgggacctggttcacgcttacctgatatagcttccttggaagaggttccaaaaatcttcgagggtctgggcaataatgagactcgggccgcaaatgctctgcaaaagggagaaaatggcatggatgagcatcacagcgttctggtggaattggagggcgataatgccagactcgcagtactcaagcgaagcgtcgaggtcacacactttgcataccccgctgtcaacctgccccctaaagttatgacggcggtcatggaccagttactcattaagcgcgcaagtcccctttcagaagacatgcatgacccagacgcctgtgatgagggtaaaccagtggtcagtgatgagcagctaacccgatggctggacaccgactctccccgggatttggaagagcgtcgcaagcttatgatggccgtagtgctggttaccgtagaactagagtgtctccggcgtttctttaccgattcagaaaccttgcgcaaactcgaagagaatctgcactacacttttagacacggctttgtgcggcaggcgtgcaagatatctaacgtggaactcaccaacctggtttcctacatgggtattctgcatgagaatcgtctaggacaaagcgtgctgcacagcacccttaagggggaagcccgccgtgattacatccgcgattgtgtctatctctacctgtgccacacgtggcaaaccggcatgggtgtatggcagcaatgtttagaagaacagaacttgaaagagcttaacaagctcttacagaaatctcttaaggttctgtggacagggttcgacgagcgcaccgtcgcttccgacctggcagacctcatcttcccagagcgtcttagggttactttgcgaaacggactgcctgactttatgagccagagcatgcttaacaattttcgctctttcatcctggaacgctccggtatcctgcccgccacctgctgcgcactgccctccgactttgtgcctctcacctaccgcgagtgccccccgccgctatggagtcactgctacctgttccgtctggccaactacctctcctaccactcggatgtgatcgaggatgtgagcggagacggcttgctggagtgtcactgccgctgcaatctgtgcacgccccaccggtccctagcttgcaacccccagttgatgagcgaaacccagataataggcacctttgaactgcaaggccccagcagccaaggcgatgggtcttctcctgggcaaagtttaaaactgaccccgggactgtggacctctgcctacttgcgcaagtttgccccggaagattaccacccctatgaaatcaagttctatgaggaccaatcacagcctccaaaggccgaactttcggcctgcgtcatcacccagggggcaattctagcccaattgcaagccatccaaaaatcccgccaagaatttctactgaaaaagggtaagggggtctaccttgacccccagaccggcgaggaactcaacacaaggttccctcaggatgtcccaacgacgagaaagcaagaagttgaaggtgcagccgccgcccccagaagatatggaggaagattgggacagtcaggcagaggaagcggaggaggacagtctggaggacagtctggaggaagacagtttggaggaggaaaacgaggaggcagaggaggtggaagaagtaaccgccgacaaacagttatccccggctgcggagacaagcaacagcgctatcatctccgctccgagtcgaggaacgcggcggcgtcccagcagtagatgggacgagaccggacgcttcccgaacccaaccaccgcttccaagaccggtaagaaggatcggcagggatacaagtcctggcgggggcataagaatgccatcatctcctgcttgcatgagtgcgggggaaacatatccttcacgcgacgctacttgctattccaccatggggtgaactttccacgcaatgttttgcattactaccgtcacctccacagcccctactatagccagcaaatcccggcaatctcgacagaaaaagacagcggcggcgacctccaacagaaaaccagcagcggcagttaaaaaatacacaacaagtgcagcaacaggaggattaaagattacagccaacgagccagcgcaaacccgagagctaagaaatcggatctttccaaccctgtatgccatcttccagcagagtcggggccaagagcaggaactgaaaataaaaaaccgatctttgcgttcgctcaccagaagttgtttgtatcacaagagcgaagatcaacttcagcgcactcttgaggacgccgaggctctcttcaacaagtactgcgcgctgactcttaaagagtaggcagcgaccgcgcttattcaaaaaaggcgggaattacatcatcctcgtcatgagtaaagaaattcccacgccttacatgtggagttatcagccccaaatgggattggcggcaggcgcctcccaggactactccacccgcatgaattggctcagcgccgggccttctatgatttctcgagttaatgatatacgcgcctaccgaaaccaaatacttttggaacagtcagctcttaccaccacgccccgccaacaccttaatcccagaaattggcccgccgccctagtataccaggaaagtcccgctcccaccactgtattacttcctcgagacgcccaggccgaagtccaaatgactaatgcaggtgcgcagttagctggcggctccaccctatgtcgtcacaggcctcggcataatataaaacgcctgatgattagaggccgaggtattcagcttaacgacgagtcggtgagctctccgcttggtctacgaccagacggaatctttcaaattgccggctgcgggagatcttccttcacccctcgtcagactgttttgactttggaaagttcgtcttcgcaaccccgctcgggcggaatcgggaccgttcaatttgtggaggagtttactccctctgtctacttcaaccctttctccggatctcctgggcactacccggacgagttcataccgaactttgacgcaattagcgagtcagtggacggctacgattgatgtctggtgacgcggctgagctatctcggctgcgacatctagaccactgccgccgctttcgctgttttgcccgggaactcattgagttcatttacttcgaactccccaaggatcaccctcaaggtccggcccacggagtgcggattactatcgaaggtaaaataaactctcgcctgcatcgaattttctcccagcggcccgtgctgatcgagcgagaccagggaaacaccacggtttctatctactgcatttgtaatcacccaggattgcatgaaagcctttgctgtcttatgtgtactgagtttaataaaaactgaattaagactctcctacggactgccgcttcttcaacccggattttacaaccagaagaacgaaacttttcctctcatccaggactctgttaactttacctttcctacttacaaaccagaagctcaacgacaacaccgcttttccagaagcattttccctactaatactactttcaaaaccggaggtgagctccacagtctccccgcagaaaacccttgggtggaagcgggccttgtagtgctaggaattcttgcgggcgggcttgtgattattctttgctacctatacacaccttgcttcactttcctagtggtgttgtggtattggtttaaaaaatggggcccatactagtcttgcttgttttactttcgcttttgggaccgggttctgccaactacaatccatgtctagactttgacccagaaaactgcacacttacttttgcacccgacacaagccgcatctgtggagttcttattaagtgcggatgggaatgcaggtccgttgaaattacacacaataacaaaacctggaacaataccttatccaccacatgggagccaggagttcccgagtggtacactgtctctgtccgaggtcctgacggttccatccgcattagtaacaacacttttattttttctacaatgtgcgatctggccatgttcatgagcaaacagtattctctatggcctcccagcaaggacaacattgtaacgttctccattgcttattgcttgtgcgcttgccttcttactgctttactgtgcgtatgcatacacctgcttgtaaccactcgtatcaaaaacgccaataacaaagaaaaaatgccttaacctctttctgtttacagacatggcttttcttacagctctcatacttgtcagcattgtcactgccgctcacggacaaacagtcgtctctatccctctaggtcataattacactctcataggacccccaatcacttcagaggtcatctggaccaaactgggaagcgttgattactttgatataatctgtaacaaaacaaaaccaataatagtaacctgcaacatacaaaatcttacattaattaatgttagcaaagtttacagcggttactattatggttatgacagatacagtagtcaatatagaaattacttggttcgtgttacccagtccaaaaccacgaaaatgccaaatatggcagaaattcgatccgatgacaattctctagaaacttttacatcttccaccacacctgacgaaaaaaatatcccagattcaatgattgcaattatcgcagcggtggcagtggtgatggcactaacagtaatatgcatgcttttatatgcttgtcgctacaaaaagtttcatcctaaaaaacaagatctcctactaaggcttaacatttaatttctttttacacagccatggtttccactaccacattccttatgcttactagtatagcaactctgacttctgctcgctcacacctcactgtaactataggctcaaactgcacactaaaaggacctcaaggtggtcatgtcttttggtggagaatatatgacaatggatggtttacaaaaccatgtgaccaacctggtagatttttctgcaacggcagagacctaaccattatcaacgtgacagcaaatgacaaaggcttctattatggaaccgactataaaagtagtttagattataacattattgtactgccatccaccactccagcgccccgcaaaactactttctctagcagcagtgccgctaacaatacaatttccaatccaacctttaccgcgcttttaaaacgcactgtgaataattctacaacaatttccacttcaacaatcagcatcatcgctgccgtgacaattggaatatctattcttgtttttaccataacctactacacctgctgctataaaaaagacgaacataaaggtgatccattacttagatttgatatttaatttgttctttttttttttatttacagtatggtgaacaccaatcatggtacctagaaatttcttcttcaccatactcatctgtgcttttaatgtttgcgctactttcacagcagtagccacagcaagcccagactgtataggagcatttgcttcctatgcactttttgcttttgtcacttgcatctgcgtatgtagcatagtctgcctggttattaattttttccaacttctagactggatccttgtgcgaattgcctacctgcgccaccatcccgaataccgcaaccaaaatatcgcggcacttcttagacttatctaaaaccatgcaggctatactaccaatatttttgcttctattgcttccctacgctgtctcaaccccagctacctatagtactccaccagaacaccttagaaaatgcaaattccaacaaccgtggtcatttcttgcttgctatcgagaaaaatctgaaattcccccaactttaataatgattgctggaataattaatgtaatctgttgcaccataatttcatttctgatataccccctatttgattttggctggaatgctcccaatgcacatgattattcccaagacccagaggaacacattcccctacataacatgcaacaaccaatagcgctaatagaatacgaaagtgaaccacaacccccactactccctgctattagttacttcaacctaaccggcggagatgactgaaacactcaccacctccaattccgccgaggatctgcttgatatggacggccgcgtctcagaacagcgactcgcccaactacgcatccgccagcagcaggaacgcgtggccaaagagctcagagatgtcatccaaattcaccaatgcaaaaaaggcatattctgtttggtaaaacaagccaaaatatcctacgagatcaccgctaccgaccatcgcctctcttacgagcttggcccccaacgacaaaaatttacctgcatggtgggaatcaaccccatagttatcacccaacaaagtggagatactaagggttgcattcactgctcctgcgattccatcgagtgcacctacaccctgctgaagaccctatgcggactaagagacctgctacccatgaattaaaaaaatgattaataaaaaatcacttacttaaaatcagcaataaggtctctattgaaattttctcccagcagcacctcacttccctcttcccaactctggtattctaaaccccgttcagcggcatactttctccatactttaaaggggatgtcaaattttagctcctctcctgtacccacaatcttcatctctttcttcccagatgaccaagagagtccggctcagtgactccttcaaccctgtctacccctatgaagatgaaagcacctcccaacacccctttataaacccagggtttatttccccaaatggcttcacccaaagcccagacggagttcttactttaaaatgtttaaccccgctaacaaccacaggcgggtctctacagctaaaagtgggagggggacttacagtagatgacactgatgggaccttacaagaaaacataggtgccaccacaccacttgttaagactgggcactctataggtttatccctaggagccggattgggaacagatgaaaataaactttgtaccaaattgggagaaggacttacattcaattcaaacaacatttgcattgatgacaatattaacaccctgtggacaggagttaaccccaccgaagccaactgtcaaatgatggactccagtgaatctaatgattgcaaattaattctaacactagttaaaactggagccctagtcactgcatttgtttatgttataggagtatctaacaattttaatatgctaactacatacagaaatataaattttactgcggagctgttttttgattctgcgggtaatttactaactagcctgtcatccctaaaaactccacttaatcataaatcaggacaaaacatggctactggtgccattactaatgctaaaagtttcatgcccagcacaactgcttatcctttcaataataattctagagaaaaagaaaactacatttacggaacttgtcactacacagctagtgatcacactgcttttcccattgacatatctgtcatgcttaaccaaagagcaataagagctgatacatcatattgtattcgtataacttggtcctggaacacaggagatgccccagaggggcaaacctctgctacaaccctagttacctccccatttaccttttactacatcagagaagacgactgacaaataaagtttaacttgtttatttgaaaatcaattcacaaactccgagtagttattttgcctcccccttcccatttaacagaatataccaatctctccccacgcacagctttaaacatttggataccattagagatagacatggttttagattccacattccaaacagtttcagagcgagccaatctggggtcagtgatagataaaaatccatcgggatagtcttttaaagcgctttcacagtccaactgatgcggatgcgactccggagtctggatcacggtcatctggaagaagaacgatgggaatcataatccgaaaacgggatcgggcgattgtgtctcatcaaacccacaagcagccgctgtctgcgtcgctccgtgcgactgctgtttatgggatcgggatccacagtgtcctgaagcatgattttaatagcccttaacattaactttctggtgcgatgcgcgcagcaacgcattcttatttcacttagattaatacagtaggtacagcacattatcacaatattgtttaataaaccataattaaaagcactccagccaaaactcatatctgatataatcgcccctgcatgaccatcataccaaagtttaatataaattaaatgacgttccctcaaaaacacactacccacatacatgatctcttttggcatgtgcatattaacaatctgtctgtaccatggacaacgttggttaatcatgcagcccaatataaccttccggaaccacactgccaacaccgctcccccagccatgcattgaagtgaaccctgctgattacaatgacaatgaagaatccaattctctcgaccgtgaatcacttgagaatgaaaaatatctatagtagcacaacatagacataaatgcatgcatcttctcataatttttaactcctcaggatttagaaacatatcccaaggaataggaagctcttgcagaacagtaaagctggcagaacaaggaagaccacgaacacaacttacactatgcatagtcatagtatcacaatctggcaacagcgggtggtcttcagtcatagaagctcgggtttcattttcctcacaacgtggtaactgggctctggtgtaaggatgatgtctggcgcatgatgtcgagcgtgcgcacaaccttgtcataatggagttgcttcctgacattctcgtattttgtatagcaaaacgcggccctggcagaacacactcttcttcgccttttatcctgccgcttagcgtgttccgtgtgatagttcaagtacagccacactcttaagttggtcaaaagaatgctggcttcagttgtaatcaaaactccatcacatctaatcgttctgaggaaatgatccacggtagcatatgcaaatcccaaccaagcaatgcaactggattgcgtttcaagcaggagaggagagggaagagacggaagaaccatgttaatttttattccaaacgatctcgcagtacttcaaattgtagatcgcgcagatggcatctgtcgcccccactgtgttggtgaaaaagcacagctagatcaaaagaaatgcgattttcaaggtgctcaacggtggcttccagcaaagcctccacgcgcacatccaagaacaaaagaataccaaaagaaggagcattttctaactcctcaatcatcatattacagtcctgcaccattcccagataattttcagctttccagccttggattattcgtgtcatttcttgtggtaaatccaatccacacattacaaacaggtcccggagggcgccctccaccaccattcttaaacacaccctcataatgacaaaatatcttgctcctgtgtcacctgtagcaaattgagaatggcaacatcaattgacatgccgttggctctaagttcttctctaagttctagttgtaaatactctttcatattatcaccaaactgcttagccagaagccccccgggaacaagagcaggacacgctacagtgcagtacaagcgcagacctccccaattggctccagcaaaaacaagattggaataagcatattgggaaccaccagtaatgtcatcaaagttgctggaaatataatcaggcagagtttgttgtaaaaattgaataaaagaaaaatttgccaaaaaaacattcaaaacctctgggatgcaaatgcaataagttaccgcgctgcgctccaacattgttagttttgaatgagtctgcaaaaaataaaaaaacaagcgtcatatcagagtagcctgacgaacaggtggataaatcagtctttccatcacaagacaagccacagggtctccagcccgaccctcgtaaaacctgtcatcgtgattaaacaacagcaccgaaagttcctcgcggtgaccagcatgaataattcttgatgaagcatacaatccaaacatgttagcatcagttaaagacaaaaaacagccaatatagcctctgggtataattatgcttaatcgtaaatatagcaaagccacccctcgcggatacaaagtaaaaggcacaggagaataaaaaatataattattcctttgctgctgttcaggcaacgtcgcccccggtccctctaaatacacatacaaagcctcatcagccatggcttaccagacaaagtacagcaggcacacaaagcacaagctctaaagtcactcaccaacctgtccacagtatatatacacaaaccctaaactgacgtaatggggctaaagtacacaaaatcccgccaaacccaacacacaccccgaaactgcgtcaccacaaaagtacagtttcacttccgcaatcccaacaagcggcacttcctctttctcacgggacgtcacatccgcttaacttgcaacctcattttcccacggccgcgccgccccttttagccgttaaccccacagccaattaccacacagcccacactttttaaaatcacctcatttacatattggcaccattccatctataaggtatattattgatgatg

SEQ ID NO: 149 - DNA, 35522 bp, Unknown
  Description of Unknown: Human adenovirus 16 sequence
cattatctataatataccttatagatggaatggtgccaacatgtaaatgaggtaatttaaaaaagtgcgcgctgtgtggtgattggctgcggggtgaacggctaaaaggggcgggcaatgctgggatgtgacgtaacttatgtgggaggagttatgttgcaagttatcgcggtaaaggtgacgtaaaacgaggtgtggtttggacacggaagtagacagttttcccacgtttactgacaggatatgaggtagttttgggcggatgcaagtgaaaattctccattttcgcgcgaaaactgaatgaggaagtgaatttctgagtcatttcgcggttatgacagggtggagtatttgccgagggccgagtagactttgaccgtttacgtggaggtttcgattaccgtgtttttcacctaaatttccgcgtacggtgtcaaagtcctgtgtttttacgtaggtgtcagctgatcactagggtatttaaacctgtcgagttccgtcaagaggccactcttgagtgccagcgagaagagttttctcctccgcgctgcgagtcagttttgcgctttgaaaatgagacacctgcgattcctgccacaggagattatctccagcgagaccgggatcgaaatactggagtttgtggtaaataccctgatgggagatgacccggaaccgccagtgcagcctttcgatccacctacgctgcacgatctgtatgatttagaggtagacgggcctgatgatcccaatgaggaagctgtaaatgggttttttactgattctatgctgctagctgccgatgaaggattggacataaaccctcctcctgagacccttgataccccaggggtggttgtggaaagcggcagaggtgggaaaaaattgcctgatctgggagcagctgaaatggacttgcgttgttatgaagagggttttcctccgagtgatgatgaagacggggaaactgaacagtccatccataccgcagtgaatgagggagtaaaagctgccagcgatgtttttaagttggactgtccggagctgcctggacatggctgtaagtcttgtgaatttcacaggaataacactggaatgaaagaactattgtgctcgctttgctatatgagaatgcactgccactttatttacagtaagtgtatttaagtgaaatttaaaggaatagtgtagctgtttaataactgttgaatggtagatttatgtttttgcttgcgattttttgtaggtcctgtgtctgatgatgagtcaccttctcctgattcaactacctcacctcctgaaattcaggcgcccgtacctgcaaacgtatgcaagcccattcctgtgaagcctaagtctgggaaacgccctgctgtggataagcttgaggacttgttggagggtggggatggacctttggaccttagtacccggaaactgccaaggcaatgagtgccctgcagctgtgtttatttagtgacgtcatgtaataaaattatgtcagctgctgagtgttttattgcttcttgggtggggacttggatatataagtaggagcagatctgtgtggttagctcatagcaacctgctgccatccatggaggtttgggctatcttggaagacctgagacagactaggctactgctagaaaacgcctcggacggagtctctggcttttggagattctggttcggtggcgatctagctaggctagtgtttaggataaaacaggactatagggaagaatttgaaaagttattggacgacagtccaggactttttgaagctcttaacttgggccatcaggctcattttaaggagaaggttttatcagttttagatttttctactcctggtagaactgctgctgctgtagcttttcttacttttatattggataaatggatccgccaaacccacttcagcaagggatacgttttggatttcatagcagcagctttgtggagaacatggaaggctcgcaggatgaggacaatcttagattactggccagtgcagcctctgggagtagcagggatactgagacacccaccggccatgccagcggttctggaggaggagcagcaggaggacaatccgagagccggcctggaccctccggtggaggagtagctgacttgtttcctgaactgcgacgggtgcttactaggtctacgtccagtggacaggacaggggcattaagagggaaaggaatcctagtgggaataattcaagaaccgagttggctttaagtttaatgagccgtaggcgtcctgaaactgtttggtggcatgaggttcagagcgaaggcagggatgaagtttcaatattgcaggagaaatattcactagaacaacttaagacctgttggttggaacctgaggatgattgggaggtggccattaggaattatgctaagatatctctgaggcctgataaacagtatagaattactaagaagattaatattagaaatgcatgctacatatcagggaatggggcagaggttataatagatacacaagataaagcagcttttagatgttgtatgatgggtatgtggccaggggttgtcggcatggaagcagtaacatttatgaatattaggtttaaaggggatgggtataatggcattgtatttatggctaacactaagctgattctacatggttgtagcttttttgggtttaataatacttgtgtagaagcttgggggcaagttagtgtgaggggttgtagtttttatgcatgctggattgcaacatcaggtagggtcaagagtcagttgtctgtgaagaaatgcatgtttgagagatgtaatcttggcatactgaatgaaggtgaagcaagggtccgccactgcgcagctacagaaactggctgcttcattctaataaagggaaatgccagtgtgaagcataatatgatctgtggacattcgaatgagaggccttatcagatgctgacctgcgctggtggacattgcaatattctggctaccgtgcatatcgtttcccatgcacgcaagaaatggcctgtatttgaacataatgtgattaccaagtgcaccatgcacataggtggtcgcaggggaatgtttatgccttaccagtgtaacatgaatcatgtgaaggtgatgttggaaccagatgccttttccagagtaagcttaacaggaatctttgatatgaatattcaactatggaagatcctgagatatgatgacactaaaccgagggtgcgcgcatgcgaatgcggaggcaagcatgctagattccagccggtgtgcgtggatgtgactgaagacctgagacccgatcatttggtgcttgcctgcactggagcggagttcggttctagtggtgaagaaactgactaaagtgagtagtgggacgagctgtggaggtgggactttgaggttggtaaggtgggcagattgggtaaattttgttaatttctgtcttgcagctgccatgagtggaagcgcttcttttgaggggggagtatttagcccttatctgacgggcaggctcccaccatgggcaggagttcgtcagaatgtcatgggatccactgtggatgggagacccgtccagcccgccaattcctcaacgctgacctatgccactttgagttcgtcaccattggatgcagctgcagccgccgccgctactgctgccgccaacaccatccttggaatgggctattacggaagcatcgttgccaattccagttcctctaataacccttcaaccctggctgaggacaagctacttgttctcttggctcagctcgaggccttaacccaacgcttaggcgaactgtctaagcaggtggcccagttgcgtgagcaaactcagtctgctgttgccacagcaaagtctaaataaagatcttaaatcaataaataaagaaatacttgttataaaaacaaatgaatgtttatttgatttttcgcgcgcggtatgccctggaccatcggtctcgatcattgagaactcggtggatcttttccagtaccctgtaaaggtgggattgaatgtttagatacatgggcattagtccgtcccgggggtggagatagctccattgaagagcctcttgctccggggtagtgttataaatcacccagtcatagcaaggtcggagtgcatggtgttgcacaatatcttttaggagcagactaattgcaacggggaggcccttagtgtaggtgtttacaaatctgttgagctgggacgggtgcatccggggtgaaattatatgcattttggactggatcttgaggttggcaatgttgccgcctagatcccgtctggggttcatattgtgcagaaccaccaagacagtgtatccggtgcacttgggaaatttatcatgcagcttagagggaaaagcatgaaaaaatttggagacgcctttgtgaccccccagattctccatgcactcatccataatgatagcgatggggccgtgggcagcggcacgggcgaacacgttccgggggtctgaaacatcatagttatgctcctgagtcaggtcatcataagccattttaataaactttgggcgaagggtgccagattgggggatgaaagttccctctggcccgggagcatagtttccctcacatatttgcatttcccaggctttcagttcagagggggggatcatatccacctgcggggctataaaaaatactgtttctggagccggggtgattaactgggatgagagcaaattcctaagcagctgagacttgccgcacccagtgggaccgtaaatgaccccaattacgggttgcagatggtagtttagggagcgacagctgccgtcctcccggagcaggggggccacttcgttcatcatttcccttacatggatattttcccgcaccaagtccgttaggaggcgctctcccccaagggatagaagctcctggagcgaggagaagtttttcagcggcttcagcccgtcagccatgggcattttggaaagagtctgttgcaagagctcgagccggtcccagagctcggtgatgtgctctatggcatctcgatccagcagacctcctcgtttcgcgggttgggacggctcctggagtagggaatcagacgatgggcgtccagcgctgccagggtccgatccttccatggtcgcagcgtccgagtcagggttgtttccgtcacggtgaaggggtgcgcgcctggttgggcgcttgcgagggtgcgcttcagactcatcctgctggtcgagaaccgctgccgatcggcgccctgcatgtcggccaggtagcagtttaccatgagttcgtagttgagcgcctcggccgcgtggcctttggcacggagcttacctttggaagttttatggcaggcggggcagtagatacatttgagggcatacagcttgggcgcgaggaaaatggattcgggggagtatgcatccgcaccgcaggaggcgcagacggtttcgcactccacgagccatgtcagatccggctcatcggggtcaaaaacaagttttccgccatgttttttgatgcgtttcttacctttggtttccatgagttcgtgtccccgctgggtaacaaagaggctgtccgtgtccccgtagactgactttatgggcctgtcctcgagcggagtgccgcggtcctcttcgtagaggaacccagcccactctgatacaaaagcgcgtgtccaggccagcacaaaggaggccacgtgggaggggtagcggtcgttgtcaaccagggggtccaccttctctacggtatgtaaacacatgtccccctcctccacatccaagaatgtgattggcttgtaagtgtaggccacgtgaccaggggtccccgccgggggggtataaaagggggcgggcctctgttcgtcttcactgtcttccggatcgctgtccaggagcgccagctgttggggtaggtattccctctcgaaggcgggcatgacctctgcactcaggttgtcagtttctaggaacgaggaggatttgatattgacagtaccagcagagatgcctttcataagactctcgtccatctggtcagaaaacacaatcttcttgttgtccagcttggtggcaaatgatccatagagggcattggatagaagcttggcgatagagcgcatggtttggttcttttccttgtccgcgcgctccttggcggcgatgttaagctggacgtactcgcgcgccacacatttccattcagggaagatggttgtcagttcatccggaactattctgactcgccatcccctattgtgcagggttatcagatccacactggtggctacctcgcctcggaggggctcattggtccagcagagtcgacctccttttcttgaacagaaaggggggagggggtctagcatgaactcatcaggggggtccgcatctatggtaaatattcccggtagcaaatccttgtcaaaatagctgatggtggcgggatcatccaaagtcatctgccattctcgaactgccagcgcgcgctcataggggttaagaggggtgccccagggcatggggtgggtgagcgcggaggcatacatgccacagatatcgtagacatagaggggctcttcgaggatgccgatgtaagtgggataacagcgcccccctctgatgcttgctcgcacatagtcatagagttcatgtgagggggcgagaagacccgggcccagattggtgcggttgggtttttccgccctgtaaacgatctggcgaaagatggcatgggaattggaagagatagtaggtctctggaatatgttaaaatgggcatgagggaggcctacagagtcccttatgaagtgggcatatgactcttgcagcttggctaccagctcggcggtgacaagtacgtctagggcacagtagtcgagagtttcctggatgatgtcataacgcggttggtttttcttttcccacagctcgcggttgagaaggtattcttcgcgatccttccagtactcttcgaggggaaacccgtctttttctgcacggtaagagcccaacatgtagaattgattgactgccttgtagggacagcatcccttctccactgggagagagtatgcttgggctgcattgcgcagcgaggtatgagtgagggcaaaagtgtccctgaccatgactttgaggaattgatacttgaagtcgatgtcatcacaggccccctgttcccagagttggaagtccacccgcttcttgtaggcggggttgggcaaagcgaaagtaacatcattgaagaggatcttgccggccctgggcataaaatttcgggtgattctgaaaggctgagggacctctgctcggttattgataacctgagcggccaagacgatctcatcaaagccattgatgttgtgccccactatgtacagttctaagaatcgaggtgtgcccctgacatgaggcagcttcttgagttcttcaaaagtgaggtctgtagggtcagtgagagcatagtgttcgagggcccattcgtgcaggtgagggttcgctttgaggaaggaggaccagaggtccactgccagtgctgtttgtaactggtcccggtactgacgaaaatgctgcccgactgccatcttttctggggtgacgcaatagaaggtttgggggtcctgctgccagcgatcccacttgagttttatagccaggtcataggcgatgttgacgagccgctggtctccagagagtttcatgaccagcatgaaggggattagctgcttgccaaaggaccccatccaggtgtaggtttccacatcgtaggtgaggaagagcctttctgtgcgaggatgagagccaatcgggaagaactggatctcctgccaccagttggaggaatggctgttgatgtgatggaagtagaactccctgcgacgcgccgagcattcatgcttgtgcttgtacagacggccgcagtactcgcatcgattcacgggatgcacctcatgaatgagttgtacctgacttcctttgacgagaaatttcagtggaaaattgaggcctggcgcttgtacctcgcgctctactatgttgtctgcatcggcatgaccatcttctgtctcgatggtggtcatgctgacgagccctcgcgggaggcaagtccagacctcggcgcggcaggggcggagctcgaggacgagagcgcgcaggtcggagctgtccagggtcctgagacgctgcggagtcaggttagtaggcagtgtcaggagattgacttgcatgatcttttcgagggcgtgagggaggttcagatggtacttgatctccacgggtccgttggtggagatgtcgatggcttgcagggttccgtgccccttgggcgctaccaccgtgcccttgtttttccgtttgggcggcggtggctctgttgcttcttgcatgtttagaagcggtgtcgagggcgcgcaccgggcggcaggggcggctcgggacccggcggcatggccggcagtggtacgtcggcgccgcgcgcgggtaggttctggtactgcgccctgagaagacttgcatgcgcgacgacgcggcggttgacatcctggatctgacgcctctgggtgaacgctaccggccccgtgagcttgaacctgaaagagagttcaacagaatcaatctcggtatcgttgacggcggcttgcctaaggatttcttgcacgtcgccagagttgtcctggtaggcgatctcggccatgaactgctcgatctcttcctcttgaagatctccgcggcccgctctctcgacggtggccgcaaggtcgttggagatgcgtccaatgagttgagagaatgcattcatgcccgcctcgttccagacgcggctgtagaccacagccccctcgggatctctcgcgcgcatgaccacctgggcgaggttgagctccacgtggcgggtgaagaccgcatagttgcataggcgctggaaaaggtagttgagtgtggtggcgatgtgctcggtgacgaagaaatacatgatccatcgtctcagcggcatctcgctaacatcgcccagcgcttccaagcgctccatggcctcgtagaagtccacggcaaagttgaaaaactgggagttacgcgcggacacggtcaactcctcttccagaagacggatgagttcggcgatggtggtgcgcacctcgcgctcgaaagcccccgggatttcttcctcaatttcttcttcttccactaacatctcttcctcttcaggtggggctgcaggaggagggggaacgcggcgacgccggcggcgcacaggcagacggtcgatgaatctttcaatgacctctccgcggcggcggcgcatggtctcggtgacggcacgaccgttctccctgggtctcagagtgaagacgcctccgcgcatctccctgaagtggtgactgggaggctctccgttgggcagggacaccgcgctgattatgcattttatcaattgccccgtaggtactccgcgcaaggacctgatcgtctcaagatccacgggatctgaaaacctttcgacgaaagcgtctaaccagtcgcaatcgcaaggtaggctgagcactgtttcttgcgggcgggggcggctagacgctcggtcggggttctctctttcttctccttcctcctctttggagggtgagacgatgctgctggtgatgaaattaaaataggcagttttgagacggcggatggtggcgaggagcaccaggtctttgggtccggcttgttggatgcgcaggcgatgggccattccccaagcattatcctgacatctggccagatctttatagtagtcttgcatgagtcgttccacgggcacttcttcttcgcccgctctgccatgcatgcgagtgatcccgaacccgcgcatgggctggacaagtgccaggtccgctacaaccctttctgcgaggatggcttgctgcacctgggtgagggtggcttggaagtcgtcaaagtccacgaagcggtggtaagccccggtgttgattgtgtaggagcagttggccatgactgaccagttgactgtctggtgccccggacgcacaatctcggtgtacttgaggcgcgagtaggcgcgggtgtcaaagatgtaatcgttacaggtgcgcaccaggtactggtagccgatgagaaagtgaggcggcggctggcggtataggggccatcgctctgtagccggggcgccaggggcgaggtcttccagcatgaggcggtgataaccgtagatgtacctggacatccaggtgataccggaggcggtggtggatgcccgcgggaactcgcgtacgcggttccagatgttgcgcagcggcatgaagtagttcatggtaggcacggtttggcccgtgagacgcgcacagtcgttgatgctctagacatacgggcaaaaacgaaagcggtcagcggctcgtctccgtggcctggaggctaagcgaacgggttgggctgcgcgtgtaccccggttcgaatctcggatcaggctggagccgcagctaacgtggtactggcactcccgtctcgacccaggcctgcacaaaacctccaggatacggaggcgggtcgttttttttttgctttttcctggatgggagccagtgctgcgtcaagctttagaacactcagttctcggggctgggagtggctcgcgcccgtagtctggagaatcaatcgccagggttgcgttgcggtgtgccccggttcgagtcttagcgcgccggatcggccggtttccgcgacaagcgagggtttggcagcctcgtcatttctaagaccccgccagccgacttctccagtttacgggagcgagccctcttttttttgttttttgttgcccagatgcatcccgtgctgcgacagatgcgcccccagcaacagcccccttctcagcagcagctacaacaacagccacaaaaggctcttcctgctcctgtaactactgcggctgcagccgtcagcggcgcgggacagcccgcctatgatctggacttggaagagggcgagggattggcgcgcctgggggctccatcgcccgagcggcacccgcgggtgcaactaaaaaaggactctcgcgaggcgtacgtgccccaacagaacctattcagggacaggagcggcgaggagccagaggagatgcgagcatctcgatttaacgcgggtcgcgagctgcgccacggtctggatcgaagacgggtgctgcaagacgaggattttgaggtcgatgaagtgacagggatcagcccagctagggcacatgtggccgcggccaacctagtctcggcctacgagcagaccgtgaaggaggagcgcaacttccaaaaatcttttaacaaccatgtgcgcaccctgatcgcccgcgaggaagtgaccctgggtctgatgcacctgtgggacctgatggaggctatcacccagaaccccactagcaaacccctgacagctcagctgtttctggtggttcaacatagcagggacaacgaggcattcagggaggcgttgttgaatatcaccgagcctgatgggagatggctgtatgatctgattaacatcctgcaaagtattatagtgcaggaacgtagcctgggtttggctgagaaagtggcagctatcaactactcggtcttgagcctgggcaaatactacgctcgcaagatctacaagaccccctacgtacccattgacaaggaggtgaagatagatgggttttacatgcgcatgactctcaaggtgttgactttaagcgacgatctgggggtgtatcgcaatgacaggatgcaccgcgcggtgagcgccagcaggaggcgcgagctgagcgacagagaacttatgcacagcttgcaaagggctctaacgggggccggaactgatggggagaactactttgacatgggagcggacttgcaatggcaacccagtcgcagggccatggaggctgcagggtgtgagcttccttacatagaagaggtggatgaagtcgaggacgaggagggcgagtacttggaagactgatggcgcgacccgtatttttgctagatggaacaacagcaggcaccggaccccgcaatgcgggcggcgctacagagccagccgtccggcattaactcctcggacgattggacccaggccatgcaacgtataatggcgctgacgacccgcaaccccgaagcctttagacagcaaccccaggccaaccgcctttcggccatactggaggccgtagtgccctcccgctccaaccccacccacgagaaggtcctggctatcgtgaacgcgctggtggagaacaaggccatccgtcccgatgaggccgggctggtatacaatgctcttttggagcgcgtggcccgttacaacagcagcaacgtgcagaccaacctggaccggatggtgaccgatgtgcgcgaggctgtgtctcagcgcgagcggttccagcgcgacgccaacttggggtcattggtagcgctaaacgctttccttagcacccagcccgccaacgtgccccgtggtcagcaagactatacaaactttttgagtgcattgagactcatggtatctgaggtgccccagagcgaggtgtaccagtccgggccagattacttcttccagaccagcagacagggcttgcagacagtgaacctgacccaggctttcaagaacctgaagggtctgtggggagtgcacgccccagtaggagatcgcgcgaccgtgtctagcttgctgactcccaactcccgcctgctgctgctgctggtatcccccttcactgacagcggtagcatcgaccgcaactcctacttgggctacctgcttaacctgtatcgcgaggctataggacagagccaggtggacgagcagacctatcaagaaatcacccaagtgagccgcgccctgggtcaggaagacacaggcggtttggaagccaccctgaacttcttactaaccaaccggtcgcagaagatccctcctcagtatgcgcttaccgctgaggaggagcggatcctaagatacgtgcaacagagcgttggactgtttttgatgcaggagggggcgacacctaccgccgcgctggatatgacagctcgaaacatggagcccagcatgtatgctagtaacaggcctttcattaacaaactgctggactacctgcacagggcggccgccatgaactctgattatttcaccaatgctattctgaacccacactggctgcccccacctggtttctacactggcgaatacgacatgcccgatcccaatgacgggttcctatgggacgatgtggacagtagcatattttccccgccgccaggttatacggtttggaagaaggaagggggcgatagaaggcactcttccgtatcgttgcccggaacggctggtgctgccgcggccgtgcccgaagctgcgagtcctttccctagcttgtccttttcactaaacagcgttcgcagcagtgaactggggagaataaaccgcccgcgcttgatgggcgaggatgagtacttgaatgactctttgctgaggccagagagggaaaagaacttccctaacaatggaatagagagcctggtggataagatgagtagatggaagacctatgcgcaggatcacagagacgagcccaggatcttgggggctacaagcagaccgagccgtagacgccagcgccacgacaggcagatgggtcttgtgtgggacgacgaggactctgccgatgacagcagcgtgttggacttgggtggaaaaggagttggcaacccgttcgctcatctgcgtccccgtttcggtcgcatgttgtaaaagtgaaagtaaaaataaaaaggcaactcaccaaggccatggcaaccgagcgtgcgttcgttcttttttttgttatctgtatctagtacgatgaggagacgagccgtgctaggcggagcggtggtgtatccggagggtcctcctccttcttacgagagcgtgatgcagcaacaggcggcgatgatacagcccccactggaggctcccttcgtaccccctcggtacctggcgcctacggaagggagaaatagcattcgttactcggagctgtcaccccagtacgataccaccaagttgtatctggtggacaacaagtcggcggacatcgcctccctgaactatcagaacgaccacagcaacttcctgaccacagtggtgcagaacaatgactttacccccacggaggctagcacccagaccattaactttgacgagcggtcgcggtggggcggtcagctgaagaccattatgcacaccaacatgcccaacgtgaacgagtacatgttcagcaacaagtttaaggcgagggtgatggtatctaggaaggctcctgaaggtgttacagtaaatgatcataaagatgatattttgaaatatgagtggtttgagttcactttaccagaaggtaacttctcagctaccatgaccatcgacctgatgaacaatgccatcattgacaactacctgaaaattggcagacagaatggagtgctggaaagtgacattggtgttaagtttgacactagaaacttcaggctcgggtgggaccccgaaactaagttgattatgccaggggtctacacttatgaggcattccatcctgacattgttttgttgcctggttgcggggtagattttactgaaagccgacttagcaacttgcttggcatcaggaagagacatccattccaggagggtttcaaaatcatgtatgaagatcttgaagggggtaatattcctgcccttttggatgtcactgcctatgaggaaagcaaaaaggataccactactgaaacaggcgaaaaggcggtggttaaaacaaccacagtggctgttgcagaggaaaccagtgaagatgataatataactagaggagatacttatataactgaaaaacaaaaacgtgaagctgcagctgcagaactattacttatgtctgaagttaaaaaagagttaaagatccaacctttagaaaaagacagcaagaatagaagctacaatgtcttggaagacaaaatcaacacagcctaccgcagctggtacctgtcctacaattatggtaaccctgagaaaggaataaggtcctggacactgctcaccacttcggatgtcacctgtggagccgagcaggtctactggtcgctccccgacatgatgcaagaccccatcaccttccgctcctcgagacaagtcaacaactacccagtagtgggtgcagagcttatgccggtcttctcaaagagtttctacaatgagcaagccgtgtactctcagcagctccgacagtccacctcgctcacgcacgtcttcaaccgcttccctgagaaccagatcctcatccgcccgccggcgcccacaattaccaccatcagtgaaaacgttcctgctctcacagatcacgggaccctgccgttacgcagcagtatccggggagtccagcgcgtgaccgttactgacgccagacgtcgcacctgtccctacgtttacaaggccctgggcatagtcgcgccgcgcgttctttcaagccgcactttctaaaaaaaaaaaaaaatgtccattctcatctcgcccagtaataataccggttggggactgcatgcgcccaccaagatgtacggaggcgcccgcaaacgctctacccagcaccccgtgcgcgttcgcggtcatttccgcgctccctggggcgccctcaagggccgtacccgcactcggaccacggtcgatgatgtgatcgaccaggtggttgccgatgctcgtaattatactcctactgcgcctacatctactgtggatgcagttattgacagtgtagtggcagacgctcgcgcctatgctcgccggaagagccgaaggaggcgcatcgccaggcgccacagggctactcccgctatgcgagctgcaaaagctattctgcggagggccaaacgtgtgggacgaagagccatgcttagagcggccagacgcgcggcttctggtgctagcagcggcaggtcccgcaggcgcgcggccacggcggcagcagcggccattgccaacatggcccaaccgcgaagaggcaatgtgtattgggtgcgcgatgccactaccggccagcgcgtgcccgtgcgcacccgcccccctcgcacttagaagatactgagcagtctccgatgttgtgtcccagcggcaagtatgtccaagcgcaaatacaaggaagagatgctccaggtcatcgcgcctgaaatctacggtccgccgatgaaggatgaaaaaaagccccgcaaaatcaagcgggttaaaaaggacaaaaaagaagaagatggcgatgatggactggtggagtttgtgcgcgagttcgcgccaagacggcgcgtgcagtggcgcggtcgaaaagtacgccaagtgcttagacccgggaccactgtggtctttacacctggcgagcgttccagcactacttttaaacggtcctatgatgaggtgtatggggatgacgatattattgagcaggcggcagaccgccttggcgagtttgcttatggcaagcgcacaagatccagtcccaaagaggaggcggtatctattcccttggatcatggaaatcccacccctagcctcaaaccagtcaccctgcagcaagtgctgcccgtacctgcgagcagaggcgtaaagcgcgagggtgaggacctatatcccaccatgcagctaatggtgcccaagcggcagagattagaagacgtactggagaaaatgaaagtggatgccgatatccagcctgaggtgaaagtgagacccatcaaggaagtggcgccaggtttgggagtacaaacctttgacatcaagattcccactgagtccatggaagtgcagaccgaacctgcaaaacccacagtcacctcaattgaggttcagacggaaccctggatgcccgcgcccgttgccgcccccagcaccactagaagatcacgtcgaaagtatggcccagcaagtctgctaatgcccaactatgctctgcacccatccatcattcccactccgggttacagaggcactcgctactatcgaagtcggagcaacacctcacgccgccgcaaactacctgcaagtcgcactcgccgtcgccgccgccgcaccactgccagcaaattaactcccgccgccctggtgcggagagtgtaccgcgatggtcgcgctgaacctctgacgctgccgcgcgcgcgctatcatccaagcatcaccacttaatgactgttgacgctgcctccttgcagatatggctctcacttgccgccttcgcgtccccattactggctaccgaggaagaaactcgcgccgtagaaggatgttggggcgagggatgcgccgccacagacgaaggcgcgctatcagcaagcgattagggggtggctttctgccagctcttatacccatcatcgccgcggcgatcggggcgataccaggcatagcttccgtggcggttcaggcctcgcagcgccactaacaatggaaaaatttataaataaaaaatagaatggactctgacgctcctggtcctgtgactatgtttttgtagagatggaagacatcaatttttcatccctggctccgcgacacggcacgaggccgtacatgggcacctggagcgacatcggcacgagccaactgaacgggggcgccttcaattggagcagtatctggagcgggcttaaaaattttggctcgaccataaaaacctatgggaacaaagcttggaacagcagcacagggcaggcccttagaaataagcttaaggagcagaacttccaacaaaaggtggtcgatggtatcgcctctggtattaacggcgtagtggatctagccaaccaggctgtgcagaaacagataaacagccgcctggacccgccgcccgcaactcctggtgaaatggaagtggaggaagagcttcctccgctggagaagcggggcgacaagcgaccgcgtcccgagctggaacagacgttggtgacgcgcgcagacgagcccccttcatacgaggaggcagtaaagctcggaatgcccactaccaggcctgtagctcacatggctaccggggtgatgaaaccttctcagtcgcatcggcctgccaccttggacttgcctcctccccctgcttctgcggcgcctattcccaaacctgtcgctaccagaaagcccaccgccgtacagcccgtcgccgtagccagaccgcgtcctggggcacaccgcgcccgaaagcaaactggcagagtactctgaacagcatcgtgggtctgggcgtgcagagtgtaaagcgccgtcgctgctattaattaaatatggagtagcgcttaacttgcttgtctgtgtgtatgtatcatcaccatgccgccgcagcagaggagaaaggaagaggtcgcgcgccgaggctgagttgctttcaagatggccaccccatcgatgatgccccaatgggcatacatgcacatcgccggacaggatgcttcggagtacctgagtccgggtctggtgcagttcgcccgtgcaacagacacctacttcagtatggggaacaagtttagaaaccccacagtggcgcccacccacgatgtgaccaccgaccgtagccagcgactaatgctgcgcttcgtgcccgttgaccgggaagacaatacctactcttacaaagttcgctacacgctggctgtaggggacaacagagtactggatatggccagcacgttctttgacatccgcggcgtgctggaccggggccctagcttcaaaccctactccgggaccgcctacaacagcctggctcccaagggagcgcccaacacctgccagtggaaggattctgacagcaaaatgcatacctttggggtagctgccatgcccggtgttactgggaaaaagatagaagctgatgggctgcctattggaatagattcaacttctggaactgacacagtaatttatgctgataaaactttccaaccagaaccacaagttggaaatgccagttgggttgacgccaatggtacagaggaaaaatatggaggcagagctctgaaggacactacaaagatgaaaccctgctatggttctttcgccaagcctaccaacaaagaaggtggtcaggctaacttaaaagattcagaaaccgccgccaccactcctaactatgatatagatctggctttctttgacaacaaaaatattgctgctaactacgatccagatattgtaatgtacacagaaaatgttgacttgcagactccagatactcatattgtatacaaacctggaacagaggacaccagctctgaatccaatttgggtcagcaagccatgcctaacagacccaactacattggcttcagagacaattttattgggctcatgtactacaacagcactggcaatatgggggtgctggccggtcaggcctctcagctgaatgctgtggttgacttgcaagacagaaacactgaactgtcctaccagctcttgcttgactctctgggtgacagaacccggtatttcagtatgtggaatcaggcggtggacagctatgatcctgatgtgcgtattattgaaaaccatggtgtggaggacgaattgccaaactattgctttccgttgaatggtgtgggatttacagacacttaccaaggtgttaaagttaaaacagatgcagttgctggaaccagtggaacacagtgggacaaagatgacaccacagttagtactgctaatgaaatccatggaggcaatccttttgccatggaaatcaacatccaagccaatctatggcgaagtttcctttattccaatgtggctttgtatctcccagactcgtataaatacaccccgtccaatgtcactctcccagaaaacaaaaacacctacgactacatgaacgggcgggtggtgccgccatctctagtagacacctatgtgaacattggtgccaggtggtctctggatgccatggacaatgtcaacccattcaaccaccaccgtaacgctggcttgcgttaccgatccatgcttctgggtaacggacgttatgtgcctttccacatacaagtgcctcaaaaattcttcgctgttaaaaacctgctgcttctcccaggctcctacacttatgagtggaactttaggaaggatgtaaacatggttctacagagttcccttggtaacgacctacgggtagatggcgccagcatcagtttcacgagcatcaatctttatgctacttttttccccatggctcacaacaccgcttccacccttgaagccatgctgcggaatgacaccaatgatcagtcattcaacgactacctatctgcagctaacatgctctaccccatacctgccaacgcaaccaatattcccatttccattccttctcgcaactgggcggctttcagaggctggtcatttaccagactgaaaaccaaagaaactccctctttggggtctggatttgacccatactttgtctattccggttctattccctacctggatggtaccttctatctaaatcacacttttaagaaggtttccatcatgtttgactcttcagtgagctggcctggaaatgacaggttactatctcctaacgaatttgaaataaagcgcactgtggatggcgaaggctacaacgtagcccaatgcaacatgaccaaagactggttcttggtacagatgctcgccaactacaacattggctaccagggcttttacatccctgagggatacaaggatcgcatgtactcctttttcagaaacttccagcctatgagcaggcaggtggttgatgaggttaattacactgactacaaagccgtcaccttaccatatcaacacaacaactctggctttgtaggataccttgcgcctactatgagacaaggggaaccttacccagccaattatccatacccgctcatcggaactactgccgttaagagtgttacccaaaaaaagttcctgtgcgacaggaccatgtggcgcataccgttctccagcaacttcatgtccatgggggcccttacagacctgggacaaaacctgctctatgccaactcggcccatgcactggacatgacttttgaggtggatcccatggatgagcccaccctgctttatcttcttttcgaagtcttcgacgtggtcagagtgcaccagccacaccgcggcgtcatcgaggccgtctacctgcgcacaccgttctcggccggcaacgccaccacataagaagcctcttgcttcttgcaagcagcagctgcagccatgtcatgcgggtccggaaacggctccagcgagcaagagctcaaagccatcgtccgagacctgggttgcggtccctatttcctgggaacctttgacaagcgtttcccggggttcatggcccccgacaagctcgcctgcgccatagtcaacactgccggacgcgagacggggggagagcactggctggcttttggttggaacccgcgctccaacacctgctacctttttgatccttttgggttctcggatgagcgactcaaacagatttaccagtttgagtacgaggggctcctgcgccgcagtgcccttgctaccaaagaccgctgcatcaccctggaaaagtccacccagagcgtgcagggcccacgctcagccgcctgtggacttttttgctgtatgttccttcatgcctttgtgcactggcccgaccgtcccatgaacggaaaccccaccatgaagttgctgactggggtgcccaacagcatgctccaatctccccaagtccagcccaccctgcgccgcaaccaggaggcactataccgcttcctaaacacccactcatcttactttcgttctcaccgcgcacgcatcgaaagggccaccgcgtttgaccgtatggatatgcaataagtcatgtaaaaccgtgttcaataaaaagcactttatttttacatgcactaaggctctggttttttgctcattcgttttcatcattcactcagaaatcaaatgggttctggcgggagtcatagtggcccgcgggcagggatacgttgcggaactgtaacctgttctgccacttgaactcggggatcaccagcttgggaactggaatctcgggaaaggtgtcttgccacaactttctggtcagttgcagggcgccaagcaggtcaggagcagagatcttgaaatcacagttggggccggcattctggacacgggagttgcggtacactgggttgcaacactggaacaccatcaaggctgggtgtctcacgcttgccagcacggtcgggtcactgatggtagtcacatccaagtcttcagcattggccatcccaaagggggtcatcttacaggtctgcctgcccatcacgggagcgcagcctggcttgtggttgcaatcgcaatgaatgggaatcagcatcatcctggcttggtcgggggttatccctggatatacggccttcatgaaggcttcgtactgcttgaaagcttcctgagccttacttccctcggtgtagaacattccacaggacttgctggaaaattggttagtagcacagttggcatcatttacacagcagcgggcatcgttgttggccaactgaaccacatttctgccccagcggttctgggtgatcttggctctgtctgggttctccttcatagcgcgctgcccgttctcgctcgccacatccatctcgataatgtggtccttctggatcatgatagtgccatgcaggcatttcaccttgccttcgtaatcggtgcatccatgagcccacagagcgcacccggtgcactcccaattattgtgggcgatctcagaataagaatgcaccaatccctgcatgaatcttcccatcatcgctgtcagggtcttcatgctactaaatgtcagcggaatgccacggtgctcctcgttcacatactggtggcagatacgcttgtactgctcgtgctgctctggcatcagcttgaaagaggttctcaggtcattatccagcctatacctctccattagcacagccatcacttccatgcccttctcccaggcagataccaggggcaagctcaaaggattcctaacagcaatagaagtagctcctttagctatagggtcattcttgtcgatcttctcaacacttctcttgccatccttctcaatgatgcgcaccggggggtagctgaagcccacggccaccaactgagcctgttctctttcttcttcgctgtcctggctgatgtcttgcagagggacatgcttggtcttcctgggcttcttcttgggagggatcgggggaggactgttgctccgttccggagacagggatgaccgcgaagtttcgcttaccagtaccacctggctctcgatagaagaatcggaccccacgcgacggtaggtgttcctcttcgggggcagaggtggaggcgactgagatgggctgcggtctggccttggaggcggatggctggcagagcccattccgcgttcgggggtgtgctcccgttggcggtcgcttgactgatttcctccgcggctggccattgtgttctcctaggcagagaaacaacagacatggaaactcagccatcactgccaacatcgctgcaagcgccatcacacctcgcccccagcagcgacgaggaggagagcttaaccaccccaccacccagtcccgctaccaccacctctaccctcgatgatgaggaggaggtcgacgcagcccaggagatgcaggcgcaggataatgtgaaagcggaagagattgaggcagatgtcgagcaggacccgggctatgtgacaccggcggagcacgaggaggagctgaaacgttttctagacagagaggatgacgaccgcccagagcatcaagcagatggcgatcaccaggaggctggcctcggggatcatgttgccgactacctctccgggcgtgggggggaggacgtgctcctcaaacatctagcaaggcagtcgctcatagttaaagacgcactactcaacctcaccgaagtgcccatcagtgtggaagagcttagccgcgcctacgagctgaacctcttttcgcctcagataccccccaagcggcagccaaacggcacctgcgaggccaaccctcgactcaacttctatccagcttttactgtccccgaagtgctggccacctaccacatcttttttaagaaccaaaagattccagtctcctgccgcgccaaccgcacccgcgcagatgcccttctcaacttgggtccgggagctcgcttacctgatatagcttccttggaagaggttccaaagatctttgagggtctgggaagtgatgagactcgggccgcaaatgctctgcaacagggagagaatggcatggatgaacatcacagcgctctagtggaactggagggtgacaatgcccggcttgcagtgctcaagcgcagtatcgtggtcacccattttgcctaccccgctgttaacctgccgcccaaagtcatgagcgctgtcatggaccatctgctcatcaaacgagcaagtccactttcagaaaaccagaacatgcaggatccagacgcctcggacgagggcaagccggtagtcagtgacgagcagctatctcgctggctgggtaccaactccccccgagatttggaagaaagacgcaagcttatgatggctgtagtgctagtaactgttgagttggagtgtctgcgccgcttttttaccgaccccgagaccctgcgcaagctagaggagaacctgcactacaccttcagacatggcttcgtgcggcaggcatgcaagatctccaacgtggagctcaccaacctggtttcatacatgggcattttgcatgagaaccggctagggcagagcgttctgcacaccaccctgaagggggaggcccgccgcgactacatccgagactgtgtctacctctacctctgccatacctggcagactggtatgggtgtgtggcaacagtgtttggaagagcagaaccttaaagagctggacaagctcttgcagagatccctcaaagccctgtggacaggttttgacgagcgcaccgtcgcctcggacttggcggacatcatcttccccgagcgtcttacggttactctgcgaaacggcctgccagacttcatgagccagagcatgcttaacaactttcgctctttcatcctggaacgctccggtatcctgcctgccacctgctgtgcgctgccctccgactttgtgcctctcacctaccgcgagtgcccaccgccgctatggagccactgctacctattccgcctggccaactacctctcctaccactcggatgtgatagaggatgtgagcggagacggcctgctggaatgccactgccgatgcaatttatgcacaccccaccgctccctcgcctgcaacccccagttgctaagcgagacccagatcatcggcaccttcgagttgcagggtcccaacagtgaaggcgaggggtcttctccggggcagagtctgaaactgacaccggggctgtggacctccgcctacctgcgcaagtttcatcccgaggactatcatccctatgagatcaggttctatgaggaccagtcacatcctcccaaagtcgagctctcagcctgcgtcatcacccagggggcaattctggcccaattgcaagccatccaaaaatcccgccaagaatttctgctgaaaaagggaagcggggtctaccttgacccccagaccggtgaggagctcaacacaaggttcccccaggatgtcccatcgccgaggaagcaagaagctgaaggtgcagctgtcacccccagaggatatggaggaagactgggacagtcaggcagaggaggagatggaagattgggacagccaggcagaggaggtggacagcctggaggaagacagtttggaggaggaagacgaggaggcagaggaggtggaagaagcaaccgccgccaaacagttgtcatcggcggcggagacaagcaagtccccagacagcagcacggctaccatctccgctccgggtcggggggcccagcggcggcccaacagtagatgggacgagaccgggcgattcccaaacccgaccaccgcttccaagaccggtaagaaggagcgacagggatacaagtcctggcgtggacataaaaacgctatcatctcctgcttgcatgaatgcgggggcaacatatccttcacccggcgatacctgcttttccaccacggtgtgaacttcccccgcaatatcttgcattactaccgtcacctccacagcccctactgcagtcagcaagtcccggcaaccccgacagaaaaagacagcagcgacaacggtgaccagaaaaccagcagttagaaaatccacaacaagtgcagcaggaggaggactgaggatcacagcgaacgagccagcgcagaccagagagctgaggaaccggatctttccaaccctctatgccatcttccagcagagtcgggggcaagagcaggaattaaaagtaaaaaaccgatctctgcgctcgctcaccagaagttgtttgtatcacaagagcgaagaccaacttcagcgcactctcgaggacgccgaggctctcttcaacaagtactgcgcgctgactcttaaagagtagcccttgcccgcgctcattcgaaaacggcgggaatcacgtcacccttggcagctgtcctttgccctcgtcatgagtaaagagattcccacgccttacatgtggagctatcagccccaaatggggttggcagcaggtgcttcccaggactactccacccgcatgaattggcttagcgccgggccctcaatgatatcacgggttaatgatatacgagcttatcgaaaccagttactcctagaacagtcagctctcaccaccacaccccgccaacaccttaatccccgaaattggcccgccgccctggtgtaccaggaaaatcccgctcccaccaccgtactacttcctcgagacgcccaggccgaagttcagatgactaacgcaggtgtacagctggcgggcggttccgccctatgtcgtcaccgacctcaacagagtataaaacgcctggtgatcagaggccgaggtatccagctcaacgacgagtcggttagctcttcgcttggtctgcgaccagacggagtcttccagatcgccggctgtgggagatcttccttcactcctcgtcaggctgtgctgactttggagagttcgtcctcgcagccccgctcgggcggcatcggaactctccagtttgtggaggagtttactccctctgtctacttcaaccccttctccggctctcctggccagtacccggacgagttcataccgaacttcgacgcaatcagcgagtcagtggatggctatgattgatgtctaatggtggcgcggctgagctagctcgactgcgacacctagaccactgccgccgctttcgctgtttcgcccgggaactcaccgagttcatctacttcgaactctccgaggagcaccctcagggtccggcccacggagtgcggattaccatcgaagggggaatagactctcgcctgcatcgcatcttctcccagcggcccgtgctgattgagcgcgaccagggaaatacaaccatctccatctactgcatttgtaaccaccccggattgcatgaaagcctttgctgtcttgtttgtgctgagtttaataaaaactgagttaagaccctcctacggactaccgcttcttcaatcaggactttacaacaccaaccagatcttccagaagacccagacccttcctcctctgatccaggactctaactctaccttaccagcaccctccactactaaccttcccgaaactaacaagcttggatctcatctgcaacaccgcctttcacgaagccttctttctgccaatactaccactcccaaaaccggaggtgagctccgcggtcttcctactgacgacccctgggtggtagcgggttttgtaacgttaggagtagttgcgggtgggcttgtgctaatcctttgctacctatacacaccttgctgtgcatatttagtcatattgtgctgttggtttaagaaatgggggccatactagtcgtgcttgctttactttcgcttttgggtctgggctctgctaatctcaatcctcttgatcacgatccatgtctagacttcgacccagaaaactgcacacttacttttgcacccgacacaagccgtctctgtggagttcttattaagtgcggatgggactgcaggtccgttgaaattacacataataacaaaacatggaacaataccttatccaccacatgggagccaggagttcccgagtggtatactgtctctgtccgaggtcctgacggttccattcgcattagtaacaacactttcattttttctgaaatgtgcgatctggccatgtttatgagcaaacagtatgacctatggcctcctagcaaagagaacattgtggcattttccattgcttattgcttggtaacatgcatcatcactgctatcatttgtgtgtgcatacacttgcttatagttattcgccctagacaaagcaatgaggaaaaagagaaaatgccttaacctttttcctcataccttttctttacagcatggcttctgttacagctctaattattgccagcattgtcactgtcgctcacgggcaaacaattgtccatattaccttaggacataatcacactcttgtagggcccccaattacttcagaggttatttggaccaaacttggaagtgttgattattttgatataatttgcaacaaaactaaaccaatatttgtaatctgcaacagacaaaatctcacgttaattaatgtcagcaaaatttataacggttactattatggttatgatagatccagtagtcaatataaaaattacttagttcgcataactcaacccaaatcaacagtgccaactatgacaataattaaaatggctaataaagcattagaaaattttacattaccaacaacgcccaatgaaaaaaacattccaaattcaatgattgcaattattgcggcggtggcattgggaatggcactaataataatatgcatgttcctatatgcttgttgctataaaaagtttaaacataaacaggatccactactaaattttaacatttaattttttatacagatgatttccactacaatttttatcattactagccttgcagctgtaacttatggccgttcacacctaactgtacctgttggctcaacatgtacactacaaggaccccaagaaggccatgtcacttggtggagaatatatgataatggagggttcgctagaccatgtgatcagcctggtacaaaattttcatgcaacggaagagacttgaccattattaacataacattaaatgagcaaggcttctattatggaaccaactataaaaatagtttagattacaacattattgtagtgccagccaccacttctgctccccgcaaatccactttctctagcagcagtgccaaagcaagcacaattcctaaaacagcttctgctatgttaaagcttcgaaaaatcgctttaagtaattccacagccgctcccaatacaattcctaaatcaacaattggcatcattactgccgtggtagtgggattaataattatatttttgtgcataatgtactacgcctgctgctatagaaaacatgaacaaaaaggtgatgcattactaaattttgatatttaattttttatagaattatgatattgtttcaatcaaataccactaacactatcaatgtgcagactactttaaatcatgacatggaaaaccacactacctcctatgcatacacaaacattcagcctaaatacgctatgcaactaagaaatcaccatactaattgtaattggaattcttatactatctgttattctttattttatattctgccgtcaaatacccaatgttcatagaaattctaaaagacgacccatctattctcctatgattagtcgtccccatatggctctgaatgaaatctaagatctttttttttctcttacagtatggtgaacatcaatcatgattcctagaaatttcttcttcaccatactcatctgtgctttcaatgtctgtgctactttcacagcagtagccactgcaagcccagactgtataggaccatttgcttcctatgcactttttgccttcgttacttgcatctgcgtgtgtagcatagtctgcctggttattaattttttccaactggtagactggatctttgtgcgaattgcctacctacgtcaccatcccgaataccgcaatcaaaatgttgcggcactttttaggcttatttaaaaccatgcaggctatgctgccagtcattttaattctgctcctaccctgcattgccctagcttccaccgccactcgcgctacacctgaacaacttagaaaatgcaaatttcaacaaccatggtcatttcttgattgctaccatgaaaaatctgattttcccacatactggatagtgattgttggaataattaacatactttcatgtacctttttctcaatcacaatataccccacatttaattttgggtggaattctcccaatgcactgggttacccacaagaaccacatgaacatatcccactacaacacatacaacaaccactagcactggtagagtatgaaaatgagccacaaccttcactgcctcctgccattagttacttcaacctaaccggcggagatgactgaaatactcaccacctccaattccgccgaggatctgcttgatatggacggccgcgcctcagaacagcgactcgcccaactacgcatacgccagcagcaggaacgtgccgccaaggagctcagggatgctattgaaattcaccaatgcaaaaaaggcatattttgtttggtaaaacaagccaagatatcctacgagattaccaatactgaccatcgcctctcatacgagctcggaccgcagcgacaaaaattcacttgtatggtgggaatcaaccccataatcatcacccagcaagctggagataccaagggttgcatccactgttcctgcagttccgccgagtgcatctacaccctgctgaagaccctctgcggccttcgagacctcctacccatgaactaatcaacccagcccctcacttaccaattacataaagccaattaataaaaacacttacttgaaatcagaaataaggtttctgtctacgttgtttccaagcagcacctcacttccttcttcccaactctggtactctaagcctcggcgggtggcatacttcctccacactttgaaagggatgtcaaattttagttcctcttctttgcccacaatcttcatttctttatccccagatggccaaacgagctcggctaagcagctccttcaatccggtctacccctatgaagatgaaagcagctcacaacacccctttataaaccctggtttcatttcctcaaatggttttgcacaaagcccagatggagttctaactcttaaatgtgttaatccactcactaccgccagcggacccctccaacttaaagttggaagcagtcttacagtagatactatcgatgggtctttggaggaaaatataactgccgcagcgccactcactaaaactaaccactccataggtttattaataggatctggcttgcaaacaaaggatgataaactttgtttatcgctgggagatgggttggtaacaaaggatgataaactatgtttatcgctgggagatgggttaataacaaaaaatgatgtactatgtgccaaactaggacatggccttgtgtttgactcttccaatgctatcaccatagaaaacaacaccttgtggacaggcgcaaaaccaagcgccaactgtgtaattaaagagggagaagattccccagactgtaagctcactttagttctagtgaagaatggaggactgataaatggatacataacattaatgggagcctcagaatatactaacaccttgtttaaaaacaatcaagttacaatcgatgtaaacctcgcatttgataatactggccaaattattacttacctatcatcccttaaaagtaacctgaactttaaagacaaccaaaacatggctactggaaccataaccagtgccaaaggcttcatgcccagcaccaccgcctatccatttataacatacgccactgagaccctaaatgaagattacatttatggagagtgttactacaaatctaccaatggaactctctttccactaaaagttactgtcacactaaacagacgtatgttagcttctggaatggcctatgctatgaatttttcatggtctctaaatgcagaggaagccccggaaactaccgaagtcactctcattacctcccccttctttttttcttatatcagagaagatgactgacaacaaaaaaaataaagatcaacttttttattgaaaatcagtttacaagattcgagtagttattttgcccccctcttcccattttatagaatacacaattctctccccacgcacagctttgaacatttgaattccattagagatagacatagttttagattccacattccacacagtttcagagcgggccaatcttggatcagtgatagatataaatccatcggaacagtctttcaaggtggtttcacagtccaactgctgcggctgcggctccggggtttggattagggtcatctggaagaagaacgatgggagtcataatccgagaacgggatcgggcggttgtgtcttaaacctcgaagcaatcgctgtctgcgccgctccgtgcgactgctgctgatgggatcaggatccacagtctctcgaagcataattttaatagccctcaacattaacatcctggtgcgatgggcacaacaacgcattctaatttcgcttagctcactgcagtaggtacaacacattaccacaatgttgtttaacaggccataattaaaggtgctccagccaaaactcatctcagggataatcatacccgcgtgaccatcgtaccaaatcttaatgtaaattagatgacgccccctccagaacacactgcccacatacataatttccttgggcatatgcatgttcacaatttctctgtaccatggacagcgctggttaatcatacagcccctaataaccttccggaaccacatagctagcactgctcccccagcaatacattgaagagaacccggctgtttacagtgacaatggagaacccacttctctcgcccatggatcacttgagaattaaatatatctatagtggcacaacacaaacataaatgcatgcatcttttcataaccctcaactcttcgggggttaaaaacatatcccagggaataggaagctcttgcaaaacagtaaagctggcagaacaaggaagaccacgaacacaacttacactatgcatagtcatagtatcacaatctggcaacagcgggtggtcttcagtcatagaagctcgggtttcattttcctcacatcgtggtaactgggctctggtgtaagggtgatgtctggcgcatgatgtcgagcgtgcgcgcaaccttgtcataatggagttgcttcctgacattctcgtattttgtatagcaaaatgcggccctggcacaacacacttttcttcgtcttctatcctgccgcttagtgtgttccgtctgataattcaagtacagccacactcttaagttggtcaaaagaatgctggcttcagttgtaatcaaaactccatcatatttaattgttctaaggaaatcatccacggtagcatatgcaaatcccaaccaagcaatgcaactggattgcgtttcaagcagcagaggagagggaagagacggaagaatcatgttaatttttattccaaacgatctcgcagtacttcaaattgtagatcgcgcagatggcatctatcgcccccactgtgttggtgaaaaagcacagctaaatcaaaagaaatgcgattttcaaggtgctcaacggtggcttccaacaaagcctccacgcgcacatccaaaaacaaaagaataccaaaagaaggagcattttctaactcctcaaacatcatattacattcctgcaccattcccagataattttcagctttccagccttgaattattcgtgtcagttcttgtggtaaatccaaaccacacattacaaacaggtcccggagggcgccctccaccaccattcttaaacacaccctcataatgacaaaatatcttgctcctgtgtcacctgtagcaaattaagaatggcatcatcaattgacatgcccttggctctaagttcttctctaagttctagttgtaaatactctctcatattatcaccaaactgcttagccagaagccccccgggaacaatagcaggggacgctacagtgcagtacaagcgcagacctccccaattggctccagcaaaaacaagattagaataagcatactgggaaccaccagtaatatcatcaaagttgctggaaatataatcaggcagagtttcttgtaaaaattgaataaaagaaaaattttccaaagaaacattcaaaacctctgggatgcaaatgcaataggttaccgcgctgcgctccaacattgttagttttgaattagtctgtaaaataaaagaaacaagcgtcatatcatagtagcctgtcgaacaggtggataaatcagtctttccatcacaagacaagccacagggtctccagcttgaccctcgtaaaacctgtcatcgtgattaaacaacagcaccgaaagttcctcgcggtggccagcatgaataattcttgatgaagcatataatccagacatgttagcatcagttaaagagaaaaaacagccaacatagcctctgggtataattatgcttaatcttaagtatagcaaagccacccctcgcggatacaaagtaaaaggcacaggagaataaaaaatataattatttctctgctgctgttcaggcaacgtcgcccccggtccctctaaatacacatacaaagcctcatcagccatggcttaccagacaaagtacagcgggcgcacaaagcacaagctctaaagaagctctaaagacactctccaacctctccacaatatatacacaagccctaaactgacgtaatgggagtaaagtgtaaaaaatcccgccaagcccaacacacaccccgaaactgcgtcagcagggaaaagtacagtttcacttccgcaaacccaacaagcgtaacttcctctttctcacggtacgtcacatccgattaacttgcaacgtcattttcccacggccgcaccgccccttttagccgttcaccccgcagccaatcaccacacagcgcgcacttttttaaattacctcatttacatgttggcaccattccatctataaggtatattattgataatg

SEQ ID NO: 150 - DNA, 35382 bp, Unknown
  Description of Unknown: Human adenovirus 21 sequence
ctatctatataatataccttatagatggaatggtgccaatatgcaaatgaggtaatttaaaaaagtgcgcgctgtgtggtgattggctgcggggtgaacggctaaaaggggcgggcaatgctgggaggtgacgtaacttatgtaggaggagttatgttgcaagttatcgcggtaaaggtgacgtaaaacgaggtgtggtttggacacggaagtagacagttttcccacgcttactgacaggatatgaggtagttttgggcggatgcaagtgaaaattctccattttcgcgcgaaaactgaatgaggaagtgaatttctgagtcatttcgcggttatgacagggtggagtatttgccgagggccgagtagactttgaccgtttacgtggaggtttcgattaccgtgtttttcacctaaatttccgcgtacggtgtcaaagtcctgtgtttttacgtaggtgtcagctgatcactagggtatttaaacctgtcgagttccgtcaagaggccactcttgagtgccagcgagaagagttttctcctccgcgctgcgagtcagttttgcgctttgaaaatgagacacctgcgattcctgccacaggagattatctccagcgagaccgggatcgaaatactggagtttgtggtaaataccctgatgggagatgacccggaaccgccagtgcagcctttcgatccacctacgctgcacgatctgtatgatttagaggtagacgggcctgatgatcccaatgaggaagctgtaaatgggttttttactgattctatgctgctagctgccgatgaaggattggacataaaccctcctcctgggacccttgataccccaggggtggttgtggaaagcggcagaggtgggaaaaaattgcctgatctgggagcagctgaaatggacttgcgttgttatgaagagggttttcctccgagtgatgatgaagatggggaaactgaacagtccatccataccgcagtgaatgagggagtaaaagctgccagcgatgtttttaagttggactgtccggagctgcctggacatggctgtaagtcttgtgaatttcacaggaataacactggaatgaaagaactattgtgctcgctttgctatatgagaatgcactgccactttatttacagtaagtgtatttaagtgaaatttaaaggaatagtgtagctgtttaataactgttgaatggtagatttatgtttttacttgcgattttttgtaggtcctgtgtctgatgatgaggcgccttctcctgattcaactacctcacctcctgaaattcaggcgcccgtacctgcaaacgtatgcaagcccattcctgtgaagcctaagtgtgggaaacgccctgctgtggataagcttgaggacttgttggagggtggggatggacctttggaccttagtacccggaaactgccaagacaatgagtgccctgcagctgtgtttatttaatgtgacgtcatgtaataaaattatgtcagctgctgagtgttttattgcttcttgggtggggacttggatatataagtaggagcagatctgtgtggttagctcatagcaacctgctgccatccatggaggtttgggctatcttggaagacctgagacagactaggctactgctagaaaacgcctcggacggagtctctggcttttggagattctggttcggtggtgatctagctaggctagtgtttaggataaaacaggactacagggaagaatttgaaaagttattggacgacagtccaggactttttgaagctcttaacttgggccaccaggctcattttaaggagaaggttttatcagttttagatttttctactcctggtagaactgctgctgctgtagcttttcttacttttatattggataaatggatccgccaaacccacttcagcaagggatacgttttggatttcatagcagcagctttgtggagaacatggaaggctcgcaggatgaggacaatcttagattactggccagtgcagcctctgggagtagcagggatactgagacacccaccggccatgccagcggttctggaggaggagcagcaggaggacaatccgagagccggcctggaccctccggtggaggagtagctgacctgtttcctgaactgcgacgggtgcttactaggtctacgtccagtggacaggacaggggcattaagagggagaggaatcctagtgggaataattcaagaaccgagttggctttaagtttaatgagccgtaggcgtcctgaaactgtttggtggcatgaggttcagagcgaaggcagggatgaagtttcaatattgcaggagaaatattcactagaacaacttaagacctgttggttggaacctgaggatgattgggaggtggccattaggaattatgctaagatatctctgaggcctgataaacagtatagaattactaagaagattaatattagaaatgcatgctacatatcagggaatggggcagaggttataatagatacccaagataaagcagcttttagatgttgtatgatgggtatgtggccaggggttgtcggcatggaagcagtaacatttatgaatattaggtttaaaggggatgggtataatggcattgtatttatggctaacactaagctgattctacatggttgtagcttttttgggtttaataatacttgtgtagaagcttgggggcaagttggtgtgaggggttgtagtttttatgcatgctggattgcaacatcaggtagggtcaagagtcagttgtctgtgaagaaatgcatgtttgagagatgtaatcttggcatactgaatgaaggtgaagcaagggtccgccactgcgcagctacagaaactggctgcttcattctaataaagggaaatgccagtgtgaagcataatatgatctgtggacattcgaatgagaggccttatcagatgctgacctgcgctggtggacattgcaatattcttgctaccgtgcatatcgtttcccatgcacgcaagaaatggcctgtatttgaacataatgtgattaccaagtgcaccatgcacataggtggtcgcaggggaatgtttatgccttaccagtgtaacatgaatcatgtgaaggtgatgttggaaccagatgccttttccagagtgagcttaacaggaatctttgatatgaatattcaactatggaagatcctgagatatgatgacactaaaccgagggtgcgcgcatgcgaatgcggaggcaagcatgctagattccagccggtgtgcgtggatgtgactgaagacctgagacccgatcatttggtgcttgcctgcactggagcggagttcggttctagtggtgaagaaactgactaaagtgagtagtggggcaatatgtggatggggactttcaggttggtaaggtggacagattgggtaaattttgttaatttctgtcttgcagctgccatgagtggaagcgcttcttttgaggggggagtatttagcccttatctgacgggcaggctcccatcatgggcaggagttcgtcagaatgtcatgggatccactgtggatgggagacccgtccagcccgccaattcctcaacgctgacctatgccactttgagttcgtcatcattggatgcagctgcagccgccgccgctactgctgccgccaacaccatccttggaatgggctattacggaagcatcgttgccaattccagttcctctaataacccttcaaccctggctgaggacaagctgcttgttctcttggctcagctcgaggccttaacccaacgcttaggcgaactgtctaagcaggtggcccagttgcgtgagcaaactgagtctgctgttgccacagcaaagtctaaataaagatctcaaatcaataaataaagaaatacttgttataaaaacaaatgaatgtttatttgatttttcgcgcgcggtatgccctggaccatcggtctcgatcattgagaactcggtggatcttttccagtaccctgtaaaggtgggattgaatgtttagatacatgggcattagtccgtctcgggggtggagatagctccattgaagagcctcttgctccggggtagtgttataaatcacccagtcatagcaaggtcggagtgcatggtgttgcacaatatcttttaggagcagactaattgcaacggggaggcccttagtgtaggtgtttacaaatctgttgagctgggacgggtgcatcctgggtgaaattatatgcattttggactggatcttgaggttggcaatgttgccgcctagatcccgtctcggattcatattgtgcagaaccaccaagacagtgtatccggtgcacttgggaaatttatcatgcagcttagagggaaaagcatgaaaaaatttggagacgcctttgtgaccccccagattctccatgcactcatccataatgatagcgatggggccgtgggcagcggcacgggcgaacacgttccgggggtctgaaacatcatagttatgctcctgagtcaggtcatcataagccattttaataaactttgggcggagggtgccagattgggggatgaaagttccctctggcccgggagcatagtttccctcacatatttgcatttcccaggctttcagttccgagggggggatcatgtccacctgcggggctataaaaaataccgtttctggagccggggtgattaactgggatgagagcaaattcctaagcagctgagacttgccgcacccagtgggaccgtaaatgaccccaattacgggttgcagatggtagtttagggagcgacagctgccgtcctcccggagcaggggggccacttcgttcatcatttcccttacatggatattttcccgcaccaagtccgttaggaggcgctctcccccaagggatagaagctcctggagcgaggagaagtttttcagcggcttcagcccgtcagccatgggcattttggaaagagtctgttgcaagagctcgagccggtcccagagctcggtgatgtgctctatggcatctcgatccaacagacctcctcgtttcgcgggttgggacggctcctggagtagggaatcagacgatgggcgtccagcgctgctagggtccgatccttccatggtcgcagcgtccgagtcagggttgtttccgtcacggtgaaggggtgcgcgcctggttgggcgcttgcgagggtgcgcttcagactcatcctgctggtcgagaaccgctgccgatcggcgccctgcaggtcggccaggtagcagtttaccatgagttcgtagttgagcgcctcggccgcgtggcctttggcacggagcttacctttggaagttttatggcaggcggggcagtagatacatttgagggcatacagcttgggcgcgaggaaaatggattcgggggagtatgcatccgcaccgcaggaggcgcagacggtttcgcactccacgagccaggtcagatccggctcatcggggtcaaaaacaagttttccgccatgttttttgatgcgtttcttacctttggtttccatgagttcgtgtccccgctgggtgacaaagaggctgtccgtgtccccgtagaccgactttatgggcctgtcctcgagcggagtgcctcggtcctcttcgtagaggaacccagcccactctgatacaaaagcgcgtgtccaggccagcacaaaggaggccacgtgggaggggtagcggtcgttgtcaaccagtgggtccaccttctctacggtatgtaaacacatgtccccctcctccacatccaagaatgtgattggcttgtaagtgtaggccacgtgaccaggggtccccgccgggggggtataaaagggggcgggcctctgttcgtcctcactgtcttcaggatcgctgtccaggagcgccagctgttggggtaggtattccctctcgaaggcgggcatgacctctgcactcaggttgtcagtttctaggaacgaggaggatttgatattgacagtaccagcagagacgcctttcataagactctcgtccatctggtcagaaaacacaatcttcttgttgtccagcttggtggcaaatgatccataaagggcattggacagaagcttggcgatggagcgcatggtttggttcttttccttgtccgcgcgctccttggcggcgatgttaagctggacgtactcgcgcgccacacatttccattcagggaagatggttgtcagttcatccggaactattctgactcgccatcccctattgtgcagggttatcagatccacactggtggccacctcgcctcggaggggctcattggtccagcagagtcgacctccttttcttgaacagaaaggtgggagggggtctagcatgaactcatcaggggggtccgcatctatggtaaatattcccggtagcaaatctttgtcaaaatagctgatggtggcgggatcatccaaggtcatctgccattctcgaactgccagcgcgcgctcataggggttaagaggggtgccccagggcatggggtgggtgagcgcggaggcatacatgccacagatatcgtagacatagaggggctcttcgaggatgccgatgtaagtgggataacagcgcccccctctgatgcttgctcgcacatagtcatagagttcatgtgagggggcgagaagacccgggcccagattggtgcggttgggtttttccgccctgtaaacgatctggcgaaagatggcatgggaattggaagagatagtaggtctctggaatatgttaaaatgggcatgaggtaggcctacagagtcccttatgaagtgggcatatgactcttgcagcttggctaccagctcggcggtgacgagtacatccagggcacagtagtcgagagtttcctggatgatgtcataacgcggttggcttttcttttcccacagctcgcggttgagaaggtattcttcgcgatccttccagtactcttcgaggggaaacccgtctttttctgcacggtaagagcccaacatgtagaactgattgactgccttgtagggacagcatcccttctccactggaagagagtatgcttgggctgcattgcgcagcgaggtatgagtgagggcaaaagtgtccctgaccatgactttgaggaattgatacttgaagtcaatgtcatcacaggccccctgttcccagagttggaagtccacccgcttcttgtaggcggggttgggcaaagcgaaagtaacatcattgaagaggatcttgccggccctgggcatgaaatttcgggtgattttgaaaggctgagggacctctgctcggttattgataacctgagcggccaagacgatctcatcaaagccattgatgttgtgccccactatgtacagttctaagaatcgaggggtgcccctgacatgaggcagcttcttgagttcttcaaaagtgagatctgtagggtcagtgagagcatagtgttcgagggcccattcgtgcacgtgagggttcgctttgaggaaggaggaccagaggtccactgccagtgctgtttgtaactggtcccggtactgacgaaaatgctgcccgactgccatcttttctggggtgacgcaatagaaggtttgggggtcctgccgccagcgatcccacttgagtttcatggcgaggtcataggcgatgttgacgagccgctggtctccagagagtttcatgaccagcatgaaggggattagctgcttgccaaaggaccccatccaggtgtaggtttccacatcgtaggtgaggaagagcctttctgtgcgaggatgagagccaatcgggaagaactggatctcctgccaccagttggaggaatggctgttgatgtgatggaagtagaactccctgcgacgcgccgagcattcatgcttgtgcttgtacagacggccgcagtactcgcagcgattcacgggatgcacctcatgaatgagttgtacctgacttcctttgacgagaaatttcagtggaaaattgaggcctggcgtttgtacctcgcgctctactatgttgtctgcatcggcatgaccatcttctgtctcgatggtggtcatgctgacgagccctcgcgggaggcaagtccagacctcggcgcggcaggggcggagctcgaggacgagagcgcgcaggccggagctgtccagggtcctgagacgctgcggagtcaggttagtaggcagtgtcaggagattgacttgcatgatcttttcgagggcgtgagggaggttcagatggtacttgatctccacgggtccgttggtggagatgtcgatggcttgcagggttccgtgccccttgggtgctaccaccgtgcccttgtttttccttttgggcggcggtggctctgttgcttcttgcatgtttagaagcggtgtcgagggcgcgcaccgggcggcaggggcggttcgggacccggcggcatggctggcagtggtacgtcggcgccgcgcgcgggtaggttctggtactgtgctctgagaagactcgcatgcgcgacgacgcggcggttgacatcctggatctgacgcctctgggtgaaagctaccggccccgtgagcttgaacctgaaagagagttcaacagaatcaatctcggtatcgttgacggcggcttgcctaaggatttcttgcacgtcgccagagttgtcctggtaggcgatctcggccatgaactgctcgatctcttcctcttgaagatctccgcggcccgctctctcgacggtggccgccaggtcgttggagatgcgcccaatgagttgagagaatgcattcatgcccgcctcgttccagacgcggctgtagaccacagcccccacgggatctctcgcgcgcatgaccacctgggcgaggttgagctccacgtggcgggtgaagaccgcatagttgcatagacgctggaaaaggtagttgagtgtggtggcgatgtgctcggtgacgaagaaatacatgatccatcgtctcagcggcatctcgctgacatcgcccagcgcttccaagcgctccatggcctcgtagaagtccacggcaaagttgaaaaactgggagttacgcgcggacacggtcaactcctcttccagaagacggatgagttcggcgacggtggtgcgcacctcgcgctcgaaagcccctgggatttcttcctcaatctcttcttcttccactaacatctcttcctcttcaggtggggctgcaggaggagggggaacgcggcgacgccggcggcgcacgggcagacggtcgatgaatctttcaatgacctctccgcggcggcggcgcatggtctcggtgacggcacgaccgttctccctgggtctcagagtgaagacgcctccgcgcatctccctgaagtggtgactgggaggctctccgttgggcagggacaccgcgctgattatgcattttatcaattgccccgtaggtactccgcgcaaggacctgatcgtctcaagatccacgggatctgaaaacctttcgacgaaagcgtctaaccagtcgcaatcgcaaggtaggctgagcactgtttcttgcgggcgggggcggctagacgctcggtcggggttctctctttcttctccttcctcctctttggagggtgagacgatgctgctggtgatgaaattaaaataggcagttttgagacggcggatggtggcgaggagcaccaggtctttgggtccggcttgttggatgcgcaggcgatgggccattccccaagcattatcctgacatctggccagatctttatagtagtcttgcatgagtcgttccacgggcacttcttcttcgcccgctctgccatgcatgcgagtgatcccgaacccgcgcatgggctggacaagtgccaggtccgctacaaccctttctgcgaggatggcttgctgcacctgggtgagggtggcttggaagtcgtcaaagtccacgaagcggtggtaagccccggtgttgattgtgtaggagcagttggccatgactgaccagttgactgtctggtgccccggacgcacaatctcggtgtacttgaggcgcgagtaggcgcgggtgtcaaagatgtaatcgttacaggtgcgcaccaggtactggtagccgataagaaagtgcggcggcggctggcggtataggggccatcgctctgtagccggggcgccaggggcgaggtcttccagcatgaggcggtgataaccgtagatgtacctggacatccaggtgataccggaggcggtggtggatgcccgcgggaactcgcgtacgcggttccagatgttgcgcagcggcatgaagtagttcatggtaggcacggtttggcccgtgagacgtgcacagtcgttgatgctctagacatacgggcaaaaacgaaagcggtcagcggctcgtctccgtggcctggaggctaagcgaacgggttgggctgcgcgtgtaccccggttcgaatctcggatcaggctggagccgcagctaacgtggtactggcactcccgtctcgacccaggcctgcacaaaacctccaggatacggaggcgggtcgtttttttttttttttgctttttcctggatgggagccagtgctgcgtcaagctttagaacactcagttctcggggctgggagtggctcgcgcccgtagtctggagaatcaatcgccagggttgcgttgcggtgtgccccggttcgagtcttagcgcgccggatcggccggtttccgcgacaagcgagggtttggcagccccgtcatttctaagaccccgccagccgacttctccagtttacgggagcgagccctctttttttgtttttttgttgcccagatgcatcccgtgctgcgacagatgcgcccccagcaacagcccccttctcagcagcagctacaacaacagccacaaaaggctcttcctgctcctgtaactactgcggctgcagccgtcagcggcgcggggcagcccgcctatgatctggacttggaagagggcgagggactggcgcgcctgggcgcaccatcgcccgagcggcacccgcgggtgcaactgaaaaaggactctcgcgaggcgtacgtgccccagcagaacctgttcagggacaggagcggcgaggagcctgaggaaatgcgagcttcccgctttaacgcgggtcgcgaactgcgtcacggtctggaccgaagacgggtgctgcgtgatgatgattttgaagtcgatgaagtgacaggaataagtcctgctagggcacatgtggccgcggccaacctagtatcagcttacgagcagaccgtgaaggaggagcgcaactttcaaaaatctttcaacaaccatgtgcgcaccctgattgcccgcgaggaagtgacactgggactgatgcacctgtgggacctgatggaagccattacccagaaccccaccagcaaacctctaaccgctcagctgtttctggtggtgcaacatagtagagacaatgaggcatttagggaggcgctgttgaacattactgagcccgaggggagatggttgtatgatcttatcaatattctgcaaagtataatagtgcaagaacgtagcctgggtctagctgagaaggtggctgctattaactactcggtcttgagcctgggcaagcactacgctcgcaagatctacaaaaccccatacgtacctatagacaaggaggtgaagatagatgggttttatatgcgcatgactctcaaggtgctgaccttgagtgacgatctgggagtgtaccgcaacgacaggatgcaccgcgcagtgagcgccagcagaaggcgtgagctgagcgacagagaacttatgcacagcttgcaaagagctctgactggggctggaaccgagggggagaactactttgacatgggagcggacttgcaatggcagcccagtcgcagggccctggacgcagcagggtatgagcttccttacatagaagaggtggatgaaggccaggatgaggagggcgagtacctggaagactgatggcgcgaccatccatatttttgctagatggaacagcaggcaccggaccccgcaaaacgggcggcgctacagagccagccgtccggcattaactcctcggacgattggagccaggccatgcaacgcatcatggcgctgacgacccgcaaccccgaagcctttaggcagcaaccccaggccaaccgcctttctgctatcctggaggccgtagtgccctcccgctccaaccccacacacgagaaggtcctggccatcgtgaacgcgctggtggagaacaaagccatacgtcccgatgaggctgggctggtatacaatgccctattggagcgcgtagcccgctacaacagcagcaacgtgcagaccaacctggaccggatggtgaccgatgtgcgcgaggccgtgtctcagcgcgagcggttccagcgagacgccaatttagggtcgctggtggctttgaacgccttcctcagcactcagcctgccaacgtgcctcgcggtcagcaagactacacaaactttctaagtgcattgagactcatggtggccgaagtccctcaaagcgaagtgtaccagtccgggccagactactttttccagaccagcagacagggcttgcagacagtgaacctgagccaggcttttaagaacctgaatggtctgtggggagtgcgcgccccagtgggagatcgggcgaccgtgtctagcttgctgacccccaactcccgcctactactgctcttggtagccccattcactgacagcggtagcatcgaccgtaattcgtacttgggctatctgttgaacctgtatcgcgaggccatagggcaaactcaggtagatgagcaaacctatcaagaaattacccaagtgagccgcgctctgggtcgggaggacactggcagcttggaagccaccttaaacttcttgctgaccaaccggtcgcagaagatccctcctcagtatgcgcttaccgcggaggaggaacggatcctgagatacgtgcagcagagcgtgggactgttcctaatgcaggagggggcgactcctactgctgcgctcgatatgacagcccgaaacatggagcccagcatgtatgccagtaaccggccttttatcaataaactgctagactacttacacagggcggctgctatgaactctgattatttcaccaatgctatcctgaacccccattggctgcccccacctgggttctatacgggcgagtatgacattgcccgacccaatgacgggtttttatgggacgatgtggacagtagtgttttctccccgcctcctggttataacacttggaagaaggaaggtggcgatagaaggcactcttccgtgtcactgtccggggcaacgggtgctgccgcagcggctcccgaggccgcaagtcctttccctagtttgccattttcgctaaacagtgtacgcagcagtgagctgggaagaataacccgtcctcgcttgatcggcgaggaggagtatttgaacgactccctgttgagacccgagagggagaagaatttccccaacaacgggatagaaagcttggttgacaaaatgaaccgctggaagacgtacgcgcacgatccccgggcgctgggggatagccggggcagcgctacccgtaaacgccagtggcacgacaggcagcggggcctggtgtgggccgatgatgattccgccgacgacagcagcgtgttggacttgggtgggagtggtggtaacccgttcgctcacctgcgcccccgcgtcgggcgcctgatgtaagaaaccgaaaataaatactcaccaaggccatggcgaccagcgtgcgttcgtttcttctctgttatatctagtatgatgaggcgaaccgtgctaggcggagcggtggtgtatccggagggtcctcctccttcgtacgagagcgtgatgcagcaggcggcggcggcgacgatgcagccaccactggaggctccctttgtaccccctcggtacctggcacctacggaggggagaaacagcattcgttactcggagctggcaccattgtatgataccacccggttgtatttggtggacaacaagtccgcggacatcgcctcactgaactatcagaacgaccacagcaacttcctcaccacggtggtgcaaaacaatgactttacccccacggaggccagcacccagaccatcaactttgacgagcggtcgcgatggggcggtcagctgaagactatcatgcacaccaacatgcccaacgtgaacgagtacatgtttagcaacaagttcaaagctcgggtgatggtgtctagaaaggctcctgaaggtgtcacagtagatgacaattatgatcacaagcaggatattttggaatatgagtggtttgagtttactctaccggaagggaatttctcagccacaatgaccattgacctaatgaacaatgccatcattgataattaccttgaagtgggcagacagaatggagtgttagagagtgacattggtgttaaatttgacaccaggaactttagactgggttgggatccggaaactaagttgattatgcctggggtttacacctatgaggcattccatcctgacattgtattgttgcctggttgcggagttgactttactgaaagtcgccttagtaacttgcttggtatcaggaaaagacacccattccaggagggttttaagatcttgtatgaggatcttgaagggggtaatatcccggccctgttggatgtagaagcctatgagaacagtaagaaagaacaagaagccaaaacagaagccgctaaagctgctgctattgctaaagccaacatagttgtcagcgaccctgtaagggtggctaatgcagaagaagtcagaggagacaactatacagcttcatctgttgcaactgacgaatcgctattggctgctgtggccgaaactacagagacaaaactcactattaaacctgtagaaaaagacagcaagagtagaagttacaatgtcttggaagataaagtgaatacagcctaccgcagctggtacctgtcctacaactatggtgaccctgaaaaaggagtccgttcctggacactgctcaccacctcggatgtcacctgtggagcagagcaggtgtactggtcgctcccagacatgatgcaggaccctgtcacattccgttccacgagacaagtcagcaactatccagtggtaggtgcagagctcatgccggtcttctcaaagagtttctacaacgagcaagccgtgtactcccagcagcttcgccagtccacctcgctcacgcacgtcttcaaccgcttccctgagaaccagatcctcatccgcccgccagcgcccaccattaccaccgtcagtgaaaacgttcctgctctcacagatcacgggaccctgccgttgcgcagcagtatccggggagtccagcgcgtgaccgttactgacgccagacgccgcacctgcccctacgtctacaaggccctgggcatagtcgcgccgcgcgtcctttcaagccgcactttctaaaaaaaaaaatgtccattcttatctcacctagtaataacaccggttggggcctgcgcgcgccaagcaagatgtacggaggtgctcgcaaacgctctacacagcaccctgtgcgcgtgcgcgggcacttccgcgctccatggggcgccctcaagggtcgtgcccgcactagaaccaccgtcgatgatgtgatcgaccaggtggtggccgatgctcgtaattatactcctactgcacctacatctactgtggatgcagttattgacagcgtagtggctgacgcccgcgcctatgctcgccggaagagcaggcggagacgcatcgccaggcgccaccgggctactcccgctatgcgagcggcaagagctctgctacggagggccaaacgcgtggggcgaagagctatgcttagagcggccagacgcgcggcttcaggtgccagtgccggcaggtcccgcaggcgcgcagccacggcggcagcagcggccattgccaacatggcccaaccgcgaagaggcaatgtgtactgggtgcgcgacgccaccaccggccagcgcgtgcccgtgcgcacccgcccccctcgctcttagaagatactgagcagtctccgatgttgtgtcccagcgaggatgtccaagcgcaaatacaaggaagagatgctccaggtcatcgcgcctgaaatctacggtccgccggtgaaggatgaaaaaaagccccgcaaaatcaagcgggtcaaaaaggacaaaaaggaagaagatggcaatgatggtctggcggagtttgtacgcgagttcgccccaaggcggcgtgtgcagtggcgtggacgcaaagtgcggcctgtgctgagacctggaaccacggtggtctttacgcccggcgagcgctccagcactgcttttaagcggtcctatgatgaggtgtatggggatgatgatattctggagcaggcggccgaccgcctgggcgagtttgcttatggcaagcgctcccgctcgagccccaaggaggaggcggtgtccattcccttggacaatgggaatcccacccctagtctcaagccagtcaccctgcagcaagtgctgcccgtgcctccacgcagaggcaacaagcgagagggtgaggatctgtatcccactatgcaattgatggtgcccaagcgccagcggctggaggacgtgctggagaaaatgaaagtggatcccgatatacaacctgaggtcaaagtgagacccatcaagcaggtggcgccaggtttgggagtacaaaccgtagacatcaagattcccaccgagtccatggaagtccaaaccgaacctgcaaagcccacaaccacctccattgaggtgcaaacggatccctggatgaccgcacccgttacaactccagctgctgtcaacaccactcgaagatcccggcgaaagtacggtccagcaagtttgctgatgccaaattatgctctgcacccatccattattccaactccgggttaccgaggcactcgctactaccgcagcaggagcagcacttcccgccgtcgccgcaaaacacctgcaagtcgtagtcaccgtcgtcgccgccgccccaccagcaatctgactcccgctgctctggtgcggagagtgtatcgcgatggccgcgcggatcccctgacgttgccgcgcgtacgctaccatccaagcatcacaacttaacaactgttgccgctgcctccttgcagatatggccctcacttgccgccttcgtgtccccattactggctaccgaggaagaaactcgcgccgtagaagagggatgttggggcgcggaatgcgacgccacaggcggcggcgcgctatcagcaagaggctggggggtggctttctgcctgctctgatccccatcatagccgcggcgatcggggcgataccaggcatagcttccgtggcggttcaggcctcgcagcgccactgacattggaaaaacttataaataaaacagaatggactctgatgctcctggtcctgtgactatgtttttgtagagatggaagacatcaatttttcatccctggctccgcgacacggcacgaggccgtacatgggcacctggagcgacatcggcaccagccaactgaacgggggcgccttcaattggagcagtatctggagcgggcttaaaaattttggctctaccataaaaacctatgggaacaaagcttggaacagcagcacagggcaggcattgagaaataagcttaaagagcaaaacttccaacagaaggtggttgatggaatcgcctctggtatcaatggggtggtggatctggccaaccaggccgtgcagaaacagataaacagccgcattgacccgccgccgtcagccccgggtgaaatggaagtggaggaagatctccctccccttgaaaagcggggcgacaagcgtccgcgccccgatctggaggagacactagtcacacgctcagacgacccgccctcctacgaggaggcagtgaagcttggaatgcccaccaccagacctgtagcccccatggctaccggggtaatgaaaccttctcagtcacaccgacccgctaccttggacttgcctccccctgctgttgcagcgcctgctcgcaagcctgtcgctaccccgaagcccaccaccgtacagcccgtcgccgtagccagaccgcgtcctgggggcactccacgtccgaatgcaaactggcagagtactctgaacagcatcgtgggtctgggcgtgcaaagtgtaaagcgccgtcgctgcttttaaattaatatggagtagcgcttaacttgcctgtctgtgtgtatgtgtcatcatcacgccgccgccgcagcaacagcagaggagcaaggaagaggtcgcgcgccgaggctgagttgatttcaagatggccaccccatcgatgctgccccagtgggcatacatgcacatcgccggacaggatgcttcggagtacctgagtccgggtctggtgcagttcgcccgcgccacagacacctacttcaatctggggaacaagtttaggaaccccaccgtggcgcccacccatgatgtgaccaccgaccgcagtcagcggctgatgctgcgctttgtgcccgttgaccgggaagacaatacctacgcatacaaagttcgatacaccttggctgtgggcgacaacagagtgctggatatggccagcactttctttgacattcggggtgtgttggatagaggccctagcttcaagccatactctggcactgcttacaactcgttggcccctaagggcgctcccaatacatctcagtggattgctgaaggcgtaaaaaaagaagatgggggatctgacgaagaggaagagaaaaatctcaccacttacacttttggaaatgccccagtgaaagcagaaggtggtgatatcactaaagacaaaggtcttccaattggttcagaaattacagacggcgaagccaaaccaatttatgcagataaactataccaaccagaacctcaggtgggagatgaaacttggactgacacagatggaacaactgagaagtatggtggtagagctctaaagccagaaactaaaatgaaaccctgctatgggtcttttgctaaacccactaacgtcaaaggcggacaggcaaaacaaaaaactactgaacaaccgcaaaaccagcaggttgaatatgatattgacatgaacttttttgatgaagcgtcacagaaagcaaacttcagtccaaaaattgtgatgtatgcagaaaatgtagacttggaaaccccagacactcatgtggtgtacaaacctggtacttcagaagaaagttctcatgctaatctgggtcaacaatctatgcccaacagacccaactacattggctttagagataactttattggacttatgtactacaacagtactggcaacatgggagtgctggcaggtcaagcatcccaattgaatgcggtggttgacttgcaggacagaaacacagaactatcatatcaactactgcttgactctctgggtgacagaaccagatacttcagcatgtggaatcaagcagtcgatagctatgatcctgatgtgcgcattattgaaaatcatggggtggaagatgagcttcccaactactgctttccattggatggagtaggggtaccaataagtagttacaaaataattgaaccaaacggacagggtgcagattggaaagagcctgacataaatggaacaagtgaaattggacaaggaaatctctttgccatggaaattaacctccaagctaatctctggagaagttttctttattccaatgtggctctgtatctcccagactcctacaaatacaccccagccaatgtcactcttccaactaacaccaacacttatgactacatgaatgggcgggtggttcccccatccctggtggatacctacgtaaacattggcgccagatggtctttggatgccatggacaatgtcaacccctttaaccatcaccgcaacgctggcctgcgataccggtccatgcttttgggcaatggtcgttacgtgcctttccacattcaagtgcctcagaaattctttgctgtgaagaacctgctgcttctacccggttcttacacctacgagtggaacttcagaaaggatgtgaacatggtcctgcagagttcccttggtaatgatctccgggtcgatggtgccagcataagttttaccagcatcaatctctatgccaccttcttccccatggcccacaacactgcctccacccttgaagccatgctgcgcaatgacaccaatgatcaatcattcaatgactacctttctgctgccaacatgctctaccccatcccggccaacgctaccaacgttcccatctccattccctctcgcaactgggccgccttcagaggctggtccttcaccagactcaaaaccaaggagactccctctttgggatcagggttcgatccctactttgtttactctggttctataccctacctggatggtaccttctaccttaaccacactttcaagaaagtctccatcatgtttgactcttcagtgagctggcctggtaatgacagattgctaagtccaaatgagttcgaaatcaagcgcacagttgatggggaaggctacaatgtggcccaatgtaacatgaccaaagactggttcctggtccagatgcttgccaactacaacattggataccagggcttctacgttcctgagggttacaaggatcgcatgtactccttcttcagaaacttccagcccatgagtagacaggtggttgatgagattaactacaaagactataaagctgtcgccgtaccctaccagcataataactctggctttgtgggttacatggctcctaccatgcgtcagggtcaagcgtaccctgctaactacccataccccctaattggaaccactgcagtaaccagtgtcacccagaaaaaattcctgtgcgacaggaccatgtggcgcatcccattctctagcaacttcatgtccatgggtgcccttacagacctgggacagaacttgctgtatgccaactcggcccatgcgctggacatgacttttgaggtggatcccatggatgagcccaccctgctttatcttcttttcgaagtcttcgacgtggtcagagtgcaccagccacaccgcggcgtcatcgaggccgtctacctgcgcacaccgttctcggccggcaacgccaccacataagaagcctcttgcttcttgcaagcagcagctgcagccatgtcatgcgggtccggaaacggctccagcgagcaagagctcaaagccatcgtccgagacctgggctgcggaccctatttcctgggaacctttgacaagcgtttcccggggttcatggcccccgacaagctcgcctgcgccatagtcaacactgccggacgcgagacggggggagagcactggctggcttttggttggaacccgcgctccaacacctgctacctttttgatccttttgggttctcggatgagcgactcaaacagatttaccagtttgagtacgaggggctcctgcgccgcagtgcccttgctaccaaagaccgctgcatcaccctggaaaagtccacccagagcgtgcagggcccgcgctcagccgcctgtggacttttttgctgtatgttccttcatgcctttgtgcactggcccgaccgccccatgaacggaaaccccaccatgaagttgctgactggggtgtcaaacagcatgctccaatcaccccaagtccagcccaccctgcgtcgcaaccaggaggcgctatatcgcttcctaaacacccactcatcttactttcgttctcaccgcgcacgcatcgaaagggccaccgcgtttgaccgtatggatatgcaataagtcatgtaaaaccgtgttcaataaaaagcactttatttttacatgcactaaggctctggttttttgctcattcgttttcatcattcactcagaaatcaaatgggttctggcgtgagtcagagtgacccgtgggcagggagacgttgcggaactgtaacctgttctgccacttgaactcggggatcaccagcttgggaactggaatttcgggaaaggtgtcttgccacaactttctggtcagttgcagggcgccaagcaggtcaggagcagagatcttgaaatcacagttggggccggcattctggacacgggagttgcggtacactgggttgcaacactggaacaccatcaaggctgggtgtctcacgcttgccagcacggtcgggtcactgatggtagtcacatccaagtcttcagcattggccattccaaagggggtcatcttacaggtctgcctgcccatcacgggagcgcagcctggcttgtggttgcaatcgcaatgaatggggatcagcatcatcctggcttggtcgggggttatccctgggtacacggccttcatgaaggcttcgtactgcttgaaagcttcctgagccttacttccctcggtgtaaaacatcccacaggacttgctggaaaattggttagtagcacagttggcatcattcacacagcagcgggcatcgttgttggccaactggaccacatttctgccccagcggttctgggtgatcttggctctgtctgggttctccttcatagcgcgctgcccgttttcgctcgccacatccatctcgataatgtggtccttctggatcataatagtgccatgcaggcatttcaccttgccttcgtaatcggtgcatccatgagcccacagagcgcacccggtgcactcccaattattgtgggcgatctcagaataagaatgcaccaatccctgcatgaatcttcccatcatcgctgtcagggtcttcatgctactaaatgtcagcgggatgccacggtgctcctcgttcacatactggtggcagatacgcttgtactgctcgtgctgctctggcatcagcttgaaagaggttctcaggtcattatccagcctatacctctccattagcacagccatcacttccatgcccttctcccaggcagataccaggggcaagctcaaaggattcctaacagcaatagaagtagctcctttagctatagggtcattcttgtcgatcttctcaacacttctcttgccatccttctcaatgatgcgcaccggggggtagctgaagcccacggccaccaactgagcctgttctctttcttcttcgctgtcctggctgatgtcttgcagagggacatgcttggtcttcctgggcttcttcttgggagggatcgggggaggactgttgctccgttccggagacagggatgaccgcgaagtttcgcttaccagtaccacctggctctcgatagaagaatcggaccccacgcgacggtaggtgttcctcttcgggggcagaggtggaggcgactgagatgggctgcggtccggccttggaggcggatggctggcagagcccattccgcgttcgggggtgtgctcccgttggcggtcgcttgactgatttcctccgcggctggccattgtgttctcctaggcagagaaacaacagacatggaaactcagccatcactgccaacatcgctgcaagcgccatcacacctcgcccccagcagcgacgaggaggagagcttaaccaccccaccacccagtcccgctaccaccacctctaccctcgatgatgaggaggaggtcgacgcagcccaggagatgcaggcgcaggataatgtgaaagcggaagagattgaggcagatgtcgagcaggacccgggctatgtgacaccggcggagcacgaggaggagctgaaacgttttctagacagagaggatgacgaccgcccagagcatcaccaggaggctggcctcggggatcatgttgccgactacctctccgggcttgggggggaggacgtgctcctcaaacatctagcaaggcagtcgatcatagttaaagacgcactactcaacctcaccgaagtgcccatcagtgtggaagagcttagccgcgcctacgagctgaacctcttttcgcctcagataccccccaagcggcagcgaaacggcacctgcgaggccaaccctcgactcaacttctatccagcttttactgtccccgaagtgctggccacctaccacatcttttttaagaaccaaaagattccagtctcctgccgcgccaaccgcacccgcgcagatgcccttctcaacttgggtccgggagctcgtttacctgatatagcttccttggaagaggttccaaagatctttgagggtctgggaagtgatgagactcgggccgcaaatgctctgcaacagggagagaatggcatggatgaacatcacagcgctctagtggaactggagggtgacaatgcccggcttgcagtgctcaagcgcagtatcgtggtcacccattttgcctaccccgctgttaacctgccgcccaaagtcatgagcgctgtcatggaccatctgctcatcaaacgagcaagtccactttcagaaaaccagaacatgcaggatccagacgcctcggacgagggcaagccggtagtcagtgacgagcagctatctcgctggctgggtaccaactccccccgagatttggaagaaagacgcaagcttatgatggctgtagtgctagtaactgttgagttggagtgtctgcgccgcttttttaccgaccccgagaccctgcgcaagctagaggagaacctgcactacaccttcagacatggcttcgtgcgccaggcatgcaagatctccaacgtggagctcaccaacctggtttcatacatgggcattttgcatgagaaccggctagggcagagcgttctgcacaccaccctgaagggggaggcccgccgcgactacatccgagactgtgtctacctctacctctgccatacctggcagactggtatgggtgtgtggcaacagtgtttggaagagcagaaccttaaagagctggacaagctcttgcagagatccctcaaagccctgtggacaggttttgacgagcgcaccgtcgcctcggacctggcggacatcatcttccccgagcgtcttagggttactctgcgaaacggcctgccagacttcatgagccagagcatgcttaacaactttcgctctttcatcctggaacgctccggtatcctgcctgccacctgctgtgcgctgccctccgactttgtgcctctcacctaccgcgagtgcccaccgccgctatggagccactgctacctattccgcctggccaactacctctcctaccactcggatgtgatagaggatgtgagcggagacggcctgctggaatgccactgccgatgcaatttatgcacaccccaccgctccctcgcctgcaacccccagttgctaagcgagacccagatcatcggcaccttcgagttgcagggtcccaacagtgaaggcgaggggtcttctccggggcagagtctgaaactgacaccggggctgtggacctccgcctacctgcgcaagttttatcccgaggactatcatccctatgagatcaggttctatgaggaccagtcacatcctcccaaagtcgagctctcagcctgcgtcatcacccagggggcaattctggcccaattgcaagccatccaaaaatcccgccaagaatttctgctgaaaaagggaagcggggtctaccttgacccccagaccggtgaggagctcaacacaaggttcccccaggatgtcccatcgccgaggaagcaagaagctgaaggtgcagctgtcacccccagaggatatggaggaagactgggacagtcaggcagaggaggagatggaagattgggacagccaggcagaggaggtggacagcctggaggaagacagtttggaggaggaagacgaggaggcagaggaggtggaagaagcaaccgccgccaaacagttgtcatcggcggcggagacaagcaagtccccagacagcagcacggctaccatctccgctccgggtcggggggcccagcggcggcccaacagtagatgggacgagaccgggcgatttccaaacccgaccaccgcttccaagaccggtaagaaggagcgacagggatacaagtcctggcgtggacataaaaacgctatcatctcctgcttgcatgaatgcgggggcaacatatccttcacccggcgatacctgcttttccaccacggtgtgaacttcccccgcaatatcttgcattactaccgtcacctccacagcccctactgcagtcagcaagtcccggcaaccccgacagaaaaagacagcagcgacaacggtgaccagaaaaccagcagttagaaaatccacaacaagtgcagcaggaggaggactgaggatcacagcgaacgagccagcgcagaccagagagctgaggaaccggatctttccaaccctctatgccatcttccagcagagtcgggggcaagagcaggaattgaaagtaaaaaaccgatctctgcgctcgctcaccagaagttgtttgtatcacaagagcgaagaccaacttcagcgcactctcgaggacgccgaggctctcttcaacaagtactgcgcgctgactcttaaagagtagcccttgcccgcgctcattcgaaaacggcgggaatcacgtcacccttggcagctgtcctttgccctcgtcatgagtaaagacattcccacgccttacatgtggagctatcagccccaaatggggttggcagcaggtgcttcccaggactactccacccgcatgaattggcttagcgccgggccctcaatgatatcacgggttaatgatatacgagcttatcgaaaccagttactcctagaacagtcagctcttaccaccacaccccgccaacaccttaatccccgaaattggcccgccgccctggtgtaccaggaaaatcccgctcccaccaccgtactacttcctcgagacgcccaggccgaagttcagatgactaacgcaggtgtacagctggcgggcggttccgccctatgtcgtcaccggcctcaacagagtataaaacgcctggtgatcagaggccgaggtatccagctcaacgacgagtcggttagctcttcgcttggtctgcgaccagacggagtcttccagatcgccggctgtgggagatcttccttcactcctcgtcaggctgtgctgactttggagagttcgtcctcgcagccccgctcgggcggcatcggaactctccagtttgtggaggagtttactccctctgtctacttcaaccccttctccggctctcctggccagtacccggacgagttcataccgaacttcgacgcaatcagcgagtcagtggatggctatgattgatgtctaatggtggcgcggctgagctagctcgactgcgacacctagaccactgccgccgctttcgctgtttcgcccgggaactcaccgagttcatttacttcgaactctccgaggagcaccctcagggtccggcccacggagtgcggattaccatcgaagggggaatagactctcgcctgcatcgcatcttctcccagcggcccgtgctgattgagcgcgaccagggaaatacaaccatctccatctactgcatctgtaaccaccccggattgcatgaaagcctttgctgtcttgtttgtgctgagtttaataaaaactgagttaagaccctcctacggactaccgcttcttcaatcaggactttacaacaccaaccagatcttccagaagacccagacccttcctcctctgatccaggactctaactctaccttaccagcaccctccactactaaccttcccgaaactaacaagcttggatctcatctgcaacaccgcctttcacgaagccttctttctgccaatactaccactcccaaaaccggaggtgagctccgcggtcttcctactgacgacccctgggtggtagcgggttttgtaacgttaggattagttgcgggtgggcttgtgctaatcctttgctacctatacacaccttgctgtgcatatttagtcatattgtgctgttggtttaagaaatgggggccatactagtcgtgcttgctttactttcgcttttgggtctgggctctgctaatctcaatcctcttgatcacgatccatgtctagacttcgacccagaaaattgcacacttacttttgcacccgacacaagccgtctctgtggagttcttattaagtgcggatgggactgcaggtccgttgaaattacacataataacaaaacatggaacaatacattatccaccacatgggaaccaggagttcccgagtggtatactgtctctgtccgaggtcctgacggttccattcgcattagtaacaacactttcattttttctgaaatgtgcgatctggccatgtttatgagcaaacagtatgacctatggcctcctagcaaagagaacattgtggcattttccattgcttattgcttggtaacatgcatcatcactgctatcatttgtgtgtgcatacacttgcttatagttattcgccctagacaaagcaatgaggaaaaagagaaaatgccttaacctttttcctcataccttttctttacagcatggcttctgttacagctctaattattgccagcattgtcactgtcgctcacgggcaaacaattgtccatattaccttaggacataatcacactcttgtagggcccccaattacttcagaggttatttggaccaaacttggaagtgttgattattttgatataatttgcaacaaaactgaaccaatatttgtaatctgtaacagacaaaatctcacgttaattaatgttagcaaaatttataacggttactattatggttatgatagatccagtagtcaatataaaaattacttagttcgcataactcagcccaaatcaacagtgccaactatgacaataattaaaatggctaataaagcattagaaaattttacattaccaacaacgcccaatgaaaaaaacattccaaattcaatgattgcaattattgcggcggtggcattgggaatggcactaataataatatgcatgttcctatatgcttgttgctataaaaagtttcaacataaacaggatccactactaaattttaacatttaattttttatacagatgatttccactacaatttttatcattactagccttgcagctgtaacttatggccgttcacacctaactgtacctgttggctcaacatgtacactacaaggaccccaagaaggctatgtcacttggtggagaatatatgataatggagggttcgctagaccatgtgatcagcctggtacaaaattttcatgcaacggaagagacttgaccattattaacataacattaaatgagcaaggcttctattatggaaccaactataaaaatagtttagattacaacattattgtagtgccagccaccacttctgctccccgcaaatccactttctctagcagcagtgccaaagcaagcacaattcctaaaacagcttctgctatgttaaagcttcgaaaaatcgctttaagtaattccacagcagctcccaatacaattcctaaatcaacaattggcatcattactgccgtggtagtgggattaatgattatatttttgtgcataatgtactacgcctgctgctatagaaaacatgaacaaaaaggtgatgcattactaaattttgatattgtttcaatcaaatgccactaacactctcaatgtgcagactactttaaaacatgacatggaaaaccacactacctcctatgcatacacaaatattcagcctaaatacgctatgcaacttagaaatcaccatactaattgtaattggaattcttacactatctgttattctttattttatattctgccgtcaaatacccaatgttcatagaaattctaaaagacgtcccatctattctcctatgattagtcgtccccatatggctctgaatgaaatctaagatctttttttttcttttacagtatggtgaacatcaatcatgattcctagaaatttcttcttcaccatactcatctgtgctttcaatgtctgtgctactttcacagcagtagccactgcaagcccagactgtataggaccatttgcttcctatgcactttttgcctttgttacttgcatctgcgtgtgtagcatagtctgcctggttattaattttttccaactggtagactggatctttgtgcgaattgcctacctacgtcaccatcccgaataccgcaatcaaaatgttgcggcacttcttaggcttatttaaaaccatgcaggctatgctaccagttattttaattctgctactaccctgcattgccctaccttccaccgccactcgcgctacacctgaacaacttagaaaatgcaaatttcaacaaccatggtcatttcttgattgctaccatgaaaaatctgattttcccacatactggatagtgattgttggaataattaacatactttcatgtaccgttttctcaatcacaatataccccacatttaattttgggtggaattctcccaatgcactgggttacccacaagaactagatgaacatatcccactacaacacatacaacaaccactagcattggtagagtatgaaaatgagccacaaccttcactgcctcctgctattagttacttcaacctaaccggcggagatgactgaaatactcaccacctccaattccgccgaggatctgcttgatatggacggccgcgcctcagaacagcgactcgcccaactacgcatccgccagcagcaggaacgcgtgaccaaagagctcagagatgtcatccaaattcaccaatgcaaaaaaggcatattttgtttggtaaaacaagccaagatatcctacgagatcaccgctactgaccatcgcctttcttacgaacttggcccccaacgacaaaaatttacatgcatggtgggaatcaaccctatagttatcacccagcaaagtggagatactaagggttgcattcactgctcttgcgattccaccgagtgcacctacaccctgctgaagaccctatgcggcctaagagacctgctacccatgaattaaaaattaataaaaaattacttacttgaaatcagcaataaggtctctgttgaaattttttcccagcagcacctcgcttccctcttcccaactctggtattctaaaccccgttcagcggcatactttctccatactttaaatgggatgtcaaattttagctcctctcctgtacccacgatcttcatgtctttcttcccagatgaccaagagagtccggctcagtgattccttcaaccctgtctacccctatgaagatgaaagcacctcccaacacccctttataaacccagggtttatttccccaaatggctttacacaaagcccagacggagttcttactttaaattgtttaaccccactaacaaccacaggcgggcctttacagttaaaagtgggagggggacttatagtggatgacactgatgggaccttacaagaaaacatacgtgctacagcacccattactaaaaataatcattctgtagaactatccattggaaatggattagaaacacaaaacaataaactatgtgccaaattgggaaatgggttaaaatttaacaacggtgacatttgtataaaggatagtattaacaccttatggactggaataaagcctccacctaactgtcaaattgtggaaaacactgatacaaacgatggcaaacttactttagtattagtaaaaaacggagggcttgttaatggctacgtatctctagttggtgtatcagacactgtgaaccaaatgttcacacaaaagtcagcaaccatacaattaagattatatttcgactcttctggaaatctattaactgatgaatcaaacttaaaaattccacttaaaaataaatcttctacagcaaccagtgaagctgcaaccagcagcaaagcctttatgccaagtactacagcttatccctttaacaccactactagggatagtgaaaactatattcatggaatatgttactatatgactagttatgatagaagtctagttcccttaaacatttctataatgctaaacagccgtacgatttcttccaatgttgcctatgccatacaatttgaatggaatctaaatgcaaaagaatctccagaaagcaacatagctacgctgaccacatccccctttttcttttcttatattagagaagacgacaactaaaaaataaagtttaagtgtttttatttaaaaatcacaaaattcgagtagttattttgcctcccccttcccatttaacagaatacaccaatctctccccacgcacagctttaaacatttggataccattagagatagacatagttttagtttccacattccaaacagtttcagagcgagccaatctggggtcagtgatacataaaaatgcatcgggatagtcttttaaagcgctttcacagtccaactgctgcggatgcgactccggagtctggatcacagtcatctggaagaagaacgatgggaatcataatccgaaaacggaatcgggcgattgtgtctcatcaaacccacaagcagccgctgtctgcgtcgctccgtgcgactgctgtttatgggatcggggtctgcagtgtcctgaagcatgattttaatagcccttaacattaactttctggtgcgatgcgcgcagcaacgcattctgatttcacttagattactacagtatgtacagcacattatcacaatattgtttaataaaccataattaaaagcgctccagccaaaactcatatctgatacaatcgcccctgcatgaccatcataccaaattttaatataaattaaatgtcgttccctcaaaaacacactacccacatacatgatctcttttggcatgtgcatattaacaatctgtctgtaccatggacaacgttggttaatcatgcaacccaatataaccttccggaaccacactgccaacaccgctcccccagccatgcattgaagtgaaccctgctgattacaatgacaatgaagaacccaattctctcgaccatgaatcacttgagactgaaaaatatctatagtagcacaacaaagacataaatgcatgcatcttctcataatttttaactcatctggatttaaaaacatatcccaaggaatgggaaactcttgcaaaacagtaaagctggcagaacaaggaagaccacgaacacaacttacactatgcatagtcatagtatcacaatctggcaacagcgggtggtcttcagtcatagaagctcgggtttcattttcctcacatcgtggtaactgggctctggtgtaagggtgatgtctggcgcatgatgtcgagcgtgcgcgcaaccttgtcataatggagttgtttcctgacattctcgtattttgtatagcaaaatgcggccctggcacaacacactcttcttcgtcttctatcctgccgcttagtgtgttccgtctgataattcaagtacagccacactcttaagttggtcaaaagaatgctggcttcagttgtaatcaaaactccatcatatttaattgttctaaggaaatcatccacggtagcatatgcaaatcccaaccaagcaatgcaactggattgtgtttcaagcagcagaggagagggaagagacggaagaatcatgttaatttttattccaaacgatctcgcagtacttcaaattgtagatcgcgcagatggcatctatcgcccccactgtgttggtgaaaaagcacagctaaatcaaaagaaatgcgattttcaaggtgctcaacggtggcttccaacaaagcctccacgcgcacatccaaaaacaaaagaataccaaaagaaggagcattttctaactcctcaaacatcatattacattcctgcaccattcccagataattttcagctttccagccttgaattattcgtgtcagttcttgtggtaaatccaaaccacacattacaaacaggtcacggagggcgccctccaccaccattcttaaacacaccctcataatgacaaaatatcttgctcctgtgtcacctgtagcaaattaagaatggcatcatcaattgacatgcccttggctctaagttcttctctaagttctagttgtaaatactctctcatattatcaccaaactgcttagccaaaagccccccgggaacaatagcaggggacgctacagtgcagtacaagcgcagacctccccaattggctccagcaaaaacaagattagaataagcatactgggaaccaccagtaatatcatcaaagttgctggaaatataatcaggcagagtttcttgtaaaaattgaataaaagaaaaattttccaaagaaacattcaaaatctctgggatgcaaatgcaataggttaccgcgctgcgctccaacattgttagttttgaattagtctgcaaaataaaagaaacaagcgtcatatcatagtagcctgtcgaacaggtggataaatcagtctttccatcacaagacaagccacagggtctccagctcgaccctcgtaaaacctgtcatcgtgattaaacaacagcaccgaaagttcctcgcggtggccagcatgaataattcttgatgaagcatataatccagacatgttagcatcagttaaagagaaaaaacagccaacatagcctctgggtataattatgcttaatcttaagtatagcaaagccacccctcgcggatacaaagtaaaaggcacaggagaataaaaaatataattatttctctgccgctgttcaggcaacgtcgcccccggtccatctaaatacacatacaaagcctcatcagccatggcttaccagacaaagaacagcgggcgcacaaagcacaagctctaaagaagctctaaagacactctccaacctctccacaatatatacacaagccctaaactgacgtaatgggagtaaagtataaaaaatcccgccaagcccaacacacaccccgaaactgcgtcagcagggaaaaatacagtttcacttccgcattcccaacaagcgtaagttcctctttctcatggtacgtcacatccgattaacttgcaacgtcattttcccacggtcgcaccgccccttttagccgttcaccccgcagccaatcaccacacagcgcgcacttttttaaattacctcatttgcatattggcaccattccatctataaggtatattatatagatag

SEQ ID NO: 151 - DNA, 34775 bp, Unknown
  Description of Unknown: Human adenovirus 34 sequence
catcatcaataatataccttatagatggaatggtgccaatatgtaaatgaggtgattttaaaaattgtggggtgtgtggtgattggctgtggggttaacggctaaacggggcggcgcggccgtgggaaaatgacgttttgtgggggtggagtttttttgcaagttgtcgcgggaaatgtgacgcataaaaaggctttttttctcacggaactactgacttttcccacggtatttaacaggaaatgaggtagttttgaccggatgcaagtgaaaattgctgatttgcgcgcgaaaactgaatgaggaagtgtttttctgaataatgtggtatttatggcagggtggagtatttgttcagggccaggtagactttgacccattacgtggaggtttcgattaccgtgttttttacctgaatttccgcgtaccgtgtcaaagtcttctgtttttacgtaggtgtcagctgatcgctacggtatttatacctcagggtttgtgtcaagaggccactcttgagtgccagcgagaagagttttctcctctgcgccggcagtttaataataaaaaaatgagagatttgcgatttctgcctcaggaaataatttctgctgagactggaaatgaaatactggagcttgtggtgcacgccctgatgggagacgatccggagccacctgtgcagctttttgagcctcctacgcttcaggaactgtatgatttagaggtagagggatcggaggattctaatgaggaagctgtgaatggcttttttaccgattctatgcttttagctgctaatgaaggattagaattagatccgcctttggacactttcgatactccaggggtgattgtggaaagcggtacaggtgtaagaaaattacctgatttgggttccgtggactgtgatttgcactgctatgaagacgggtttcctccgagtgatgaggaggaccatgaaaaggagcagtctatgcagactgcagcgggtgagggagtgaaggctgccagtgttggttttcagttggattgcccggagcttcctggacatggctgtaagtcttgtgaatttcacaggaaaaatactggagtaaaggaactgttatgttcgctttgttatatgagagcgcactgccactttatttacagtaagtgtgtttaagttaaaatttaaaggaatatgctgtttttcacatgtatattgagtgggagttttgtgcttcttattataggtcctgtgtctgatgctgatgagtcaccatctcctgattctactacctcacctcctgagattcaagcacctgttcctgtggacgtgcgcaagcccattcctgtgaagcttaagcctgggaaacgtccagcagtggaaaaacttgaggacttgttacagggtggggacggacctttggacttgagtacacggaaacggccaagacaataagtgttccatatccgtgtttacttaaggtgacgtcaatatttgtgtgagagtgcaatgtaataaaaatatgttaactgttcactggtttttattgctttttgggcggggactcaggtatataagtagaagcagacctgtatggttagctcataggagctggctttcatccatggaggtttgggccattttggaagaccttagaaagactaggcaactgttagaggacgcttcggacggagtctccggtttttggagattctggttcgctagtgaattagctagggtagtttttaggataaaacaggactataaagaagaatttgaaaagttgttggtagattgcccaggactttttgaagctcttaatttgggccatcaagttcactttaaagaaaaagttttatcagttttagacttttcaaccccaggtagaactgccgctgctgtggcttttcttacttttatattagataaatggatcccgcagactcatttcagcaggggatacgttttggatttcgtagccacagcattgtggagaacatggaaggttcgcaagatgaggacaatcttaggttactggccagtgcagcctttgggtgtagcgggaatcctgaggcatccaccggtcatgccagcggttctggaggaggaacagcaagaggacaacccgagagccggcctggaccctccagtggaggaggcggagtagctgacttgtctcctgaactgcaacgggtgcttactggatctacgtccactggacgggataggggcgttaagagggagagggcatctagtggtactgatgctagatctgagttggctttaagtttaatgagtcgcagacgtcctgaaaccatttggtggcatgaggtccagaaagagggaagggatgaagtttctgtattgcaggagaaatattcactggaacaggtgaaaacatgttggttggagcctgaggatgattgggaggtggccattaaaaattatgccaagatagctttgaggcctgataaacagtataagattactagacggattaatatccggaatgcttgttacatatctggaaatggggctgaggtggtaatagatactcaagacaaggcagttattagatgctgcatgatggatatgtggcctggagtagtcggtatggaagcagtaacttttgtaaatgttaagtttaggggagatggttataatggaatagtgtttatggccaataccaaacttatattgcatggttgtagcttttttggtttcaacaatacctgtgtagatgcctggggacaggttagtgtacggggatgtagtttctatgcgtgttggattgccacagctggcagaaccaagagtcaattgtctctgaagaaatgcatattccaaagatgtaacctgggcattctgaatgaaggcgaagcaagggtccgccactgcgcttctacagatactggatgttttattttaattaagggcaatgccagcgtaaagcataacatgatttgcggtgcttccgatgagaggccttatcaaatgctcacttgtgccggtgggcattgtaatatgctggctactgtgcatattgtttcccatcaacgcaaaaaatggcctgtttttgatcacaatgtgttgaccaagtgtaccatgcatgcaggtgggcgtagaggaatgtttatgccttaccagtgtaacatgaatcatgtgaaagtgttgttggaaccagatgccttttccagaatgagcctaacaggaatctttgacatgaacatgcaaatctggaagatcctgaggtatgatgatacgagatcgagggtgcgcgcatgcgaatgcggaggcaagcatgccaggttccagccggtgtgtgtagatgtgactgaagatctgagaccggatcatttggttattgcccgcactggagcagagttcggatccagtggagaagaaactgactaaggtgagtattgggaaaacttggggtggggttttcagatggacagattgagtaaaaatttgttttttctgtctttcagctgtcatgagtggaaacgcttcttttaaggggggagtcttcagcccttatctgacagggcgtctcccatcctgggcaggagttcgtcagaatgttatgggatctactgtggatggaagacccgtccaacccgccaattcttcaacgctgacctatgctactttaagttcttcacctttggacgcagctgcagccgccgccgccgcctctgttgccgctaacactgtgcttggaatgggttactatggaagtatcgtggctaattccacttcctctaataacccttctaccctgactcaggacaagttacttgtccttttggcccagctggaggctttgacccaacgtctgggtgaactttatcagcaggtggccgagttgcgagtacaaactgagtctgctgtcggcacggcaaagtctaaataaaaaaaaattccacaatcaatgaataaataaacgagcttgttgttgatttaaaatcaagtgtttttatttcatttttcgcgcacggtatgccctagaccaccgatctcgatcattgagaacacggtggattttttccagaatcctatagaggtgggattgaatgtttagatacatgggcattaggccatctttggggtggagatagctccattgaagggattcatgctccggggtagtgttgtaaatcacccagtcataacaaggtcgcagtgcatggtgttgcacaatatcttttagaagtaggctgattgccacagataagcccttggtgtaggtgtttacaaaccggttgagctgggaggggtgcattcggggtgaaattatgtgcattttggattggatttttaagttggcaatattgccgccaagatctcgtcttgggttcatgttatgaaggaccaccaagacggtgtatccggtacatttaggaaatttatcgtgtagcttggatggaaaagcgtggaaaaatttggagacacccttgtgtcctccgagattttccatgcactcatccatgataatagcaatggggccgtgggcagcagcgcgggcaaacacgttccgtgggtctgacacatcatagttatgttcctgagttaaatcatcataagccattttaatgaatttggggcggagagtacccgattggggtatgaatgttccttcgggccccggagcatagttcccctcacagatttgcatttcccaagctttcagttccgatggtggaatcatgtccacctggggggctatgaagaacaccgtttctggggcgggggtgattagttgggatgatagcaagtttctgagcaattgagatttgccacatccggtggggccataaatgattccgattacaggttgcaggtggtagtttagggaacggcaactgccgtcttctcgaagcaagggggccacctcgttcatcatttcccttacatgcatattttcccgcaccaaatccattaggaggcgctctcctcctagtgatagaagttcttgtagtgaggaaaagtttttcagcggttttagaccgtcagccatgggcattttggagagagtttgctgcaaaagttctagtctgttccacagttcagtgatgtgttctatggcatctcgatccagcagacctcctcgtttcgcgggtttggacggctcctggagtagggtatgagacgatgggcgtccagcgctgccagggttcggtccttccagggtctcagtgttcgagtcagggttgtttccgtcacagtgaaggggtgtgcgcctgcttgggcgcttgccagggtgcgcttcagactcattctgctggtggagaacttctgtcgcttggcgccctgtatgtcggccaagtagcagtttaccatgagttcgtagttgagcgcctcggctgcgtggcctttggcgcggagcttacctttggaagttttcttgcataccgggcagtataggcatttcagcgcatacagcttgggcgcaaggaaaatggattctggggagtatgcatctgcgccgcaggaggcgcaaacagtttcacattccaccagccaggttaaatccggttcattggggtcaaaaacaagttttccgccatattttttgatgcgtttcttacctttggtctccatgagttcgtgtcctcgttgagtgacaaacaggctgtccgtatccccgtagactgattttacaggcctcttctccagtggagtgcctcggtcttcttcgtacaggaactctgaccactctgatacaaaggcgcgcgtccaggccagcacaaaggaggctatgtgggaggggtagcgatcgttgtcaaccagggggtccaccttttccaaagtatgcaaacacatgtcaccctcttcaacatccaggaatgtgattggcttgtaggtgtatttcacgtgacctggggtccccgctgggggggtataaaagggggcggttctttgctcttcctcactgtcttccggatcgctgtccaggaacgtcagctgttggggtaggtattccctctcgaaggcgggcatgacctctgcactcaggttgtcagtttctaagaacgaggaggatttgatattgacagtgccggttgagatgcctttcatgaggttttcgtccatttggtcagaaaacacaatttttttattgtcaagtttggtggcaaatgatccatacagggcgttggataaaagtttggcaatggatcgcatggtttggttcttttccttgtccgcgcgctctttggcagcgatgttgagttggacatactcgcgtgctaggcacttccattcggggaagatagttgtcaattcatctggcacgattctcacttgccaccctcgattatgcaaggtaattaaatccacactggtggccacctcgcctcgaaggggttcgttggtccaacagagcctacctcctttcctagaacagaaagggggaagtgggtctagcataagttcatcgggagggtctgcatccatggtaaagattcccggaagtaaatccttatcaaaatagctgatgggagtggggtcatctaaggccatttgccattctcgagctgccagtgcacgctcatatgggttaaggggactgccccagggcatgggatgggtgagtgcagaggcatacatgccacagatgtcatagacgtagatgggatcctcaaagatgcctatataggttggatagcatcgcccccctctgatacttgctcgcacatagtcatatagttcatgtgatggcgctagcaaccccggacccaagttggtgcgattgggtttttctgttctgtagacaatctggcgaaagatggcgtgagaattggaagagatggtgggtctttgaaaaatgttgaaatgggcatgaggtagacctacagagtctctgacaaagtgggcataagattcttgaagcttggttaccagttcggcggtgacaagtacgtctagggcgcagtagtcaagtgtttcttgaatgatgtcataacctggttggtttttcttttcccacagttcgcggttgagaaggtattcttcgcgatccttccagtactcttctagcggaaacccgtctttgtctgcacggtaagatcctagcatgtagaactgattaactgccttgtaagggcagcagcccttctctacgggtagagagtatgcttgagcagcttttcgcagcgaagcgtgagtaagggcgaaggtgtctctgaccatgactttgagaaattggtatttgaagtccatgtcgtcacaggctccctgttcccagagttggaagtctacccgtttcttgtaggcggggttgggcaaagcgaaagtaacatcgttgaagagaatcttaccggctctgggcataaaattgcgagtgatgcggaaaggctgtggtacttccgctcgattgttgatcacctgggcagctaggacgatctcgtcgaaaccgttgatgttgtgtcctacgatgtataattctatgaaacgcggcgtgcctttgacgtgaggtagcttattgagctcatcaaaggttaggtctgtagggtcagataaggcgtagtgttcgagagcccattcgtgcaggtgaggatttgcatgtaggaatgatgaccaaagatccaccgccagtgctgtttgtaactggtcccgatactgacgaaaatgctggccaattgccattttttctggagtgacacagtagaaggttctggggtcttgttgccatcgatcccactttagtttaatggctagatcgtgggccatgttgacgagacgctcttctcctgagagtttcatgaccagcatgaaaggaactagttgtttgccaaaggaccccatccaggtgtaagtttccacatcgtaggtcaggaagagtctttctgtgcgaggatgagagccgatcgggaagaactggatttcctgccaccagttggaggattggctgttgatgtgatggaagtagaagtttctgcggcgcgccgagcattcgtgtttgtgcttgtacagacggccgcagtagtcgcagcgttgcacgggttgtatctcgtgaatgagctgtacctggcttcccttgacgagaaatttcagtgggaagccgaggcctggcgattgtatctcgtgctcttctatattcgctgtatcggcctgttcatcttctgtttcggtggtggtcatgctgacgagcccccgcgggaggcaagtccagacctcggcgcgggaggggcggagctgaaggaccagagcgcgcaggctggagctgtccagagtcctgagacgctgcggactcaggttagtaggtagggacagaagattaacttgcatgatcttttccagggcgtgcgggaggttcagatggtacttgatttccacaggttcgtttgtagagatgtcaatggcttgcagggttccgtgtcctttgggcgccactaccgtacctttgttttttcttttgatcggtggtggctctcttgcttcttgcatgctcagaagcgatgacggggacgcgcgccgggcggaagcggttgttccggacccggaggcatggctggtagtggcacgtcggcgccgcgcacgggcaggttctggtactgcgctctgagaagacttgcgtgcgccaccacgcgtcgattgacgtcttgtatctgacgtctctgggtgaaagctaccggccccgtgagcttgaacctgaaagagagttcaacagaatcaatttcggtatcgttaacggcagcttgtctcagtatttcttgtacgtcaccagagttgtcctggtaggcgatctccgccatgaactgctcgatttcttcctcctgaagatctccgcgacccgctctctcgacggtggccgcgaggtcattggagatacggcccatgagttgggagaatgcagtcatgcccgcctcgttccagacgcggctgtaaaccacggccccctcggagtctcttgcgcgcatcaccacctgagcgaggttaagctccacgtgtctggtgaagaccgcatagttgcataggcgctgaaaaaggtagttgagtgtggtggcaatgtgttcggcgacgaagaaatacatgatccatcgtctcagcggcatttcgctgacatcgcccagagcttccaagcgctccatggcctcgtagaagtccacggcaaaattaaaaaactgggagtttcgcgcggacacggtcaattcctcctcgagaagacggatgagttcggctatggtggcccgtacttcgcgttcgaaggctcccgggatctcttcttcctcttctatctcttcttccactaacatctcttcttcgtcttcaggcgggggcggagggggcacacggcgacgtcgacggcgcacgggcaaacggtcgatgaatcgttcaatgacctctccgcggcggcggcgcatggtttcagtgacggcgcggccgttctcgcgcggtcgcagagtaaaaacaccgccgcgcatctccttaaagtggtgactgggaggttctccgtttgggagggagagggcgctgattatacattttattaattggcccgtagggactgcgcgcagagatctgatcgtgtcaagatccacgggatctgaaaacctttcgacgaaagcgtctaaccagtcacagtcacaaggtaggctgagtacggcttcttgtgggcgggggtggttatgtgttcggtctgggtcttctgtttcttcttcatctcgggaaggtgagacgatgctgctggtgatgaaattaaagtaggcagttctaagacggcggatggtggcgaggagcaccaggtctttgggtccggcttgctggatacgcaggcgattggccattccccaagcattatcctgacatctagcaagatctttgtagtagtcttgcatgagccgttctacgggcacttcttcctcacccgttctgccatgcatacgtgtgagtccaaacccgcgcattggttgtaccagtgccaagtcagctacgactctttcggcgaggatggcttgctgtacttgggtgagggtggcttgaaagtcatcaaaatccacaaagcggtggtaagccccggtattaatggtgtaagcacagttggccatgactgaccagttaactgtctggtgaccagggcgcacgagctcggtgtatttaaggcgcgaataggcgcgggtgtcaaagatgtaatcgttgcaggtgcgcaccagatactggtaacctataagaaaatgcggcggtggttggcggtagagaggccatcgttctgtagctggagcgccgggggcgaggtcttccaacataaggcggtgatagccgtagatgtacctggacatccaggtgattcctgcggcggtagtagaagcccgaggaaactcgcgtacgcggttccaaatgttgcgtagcggcatgaagtagttcattgtaggcacggtttgaccagtgaggcgcgcgcagtcattgatgctctatagacacggagaaaatgaaagcgttcagcgactcgactccgtagcctggaggaacgtgaacgggttgggtcgcggtgtaccccggttcgagacttgtactcgagccggccggagccgcggctaacgtggtattggcactcccgtctcgacccagcctacaaaaatccaggatacggaatcgagtcgttttgctggttgccgaatggcagggaagtgagtcctattttttttttttgccgctcagatgcatcccgtgctgcgacagatgcgtccccaacaacagcccccctcgcagcagcagcaaccacaaaaggctgtccctgcaactactgcaactgccgctgtgagcggtgcgggacagcccgcctatgatctggacttggaagagggcgaaggactggcacgtctaggtgcgccttcgcccgagcggcatccgcgagttcaactgaaaaaagattctcgcgaggcgtatgtgccccaacagaacctatttagagacagaagcggcgaggagccggaggagatgcgagcttcccgctttaacgcgggtcgtgagctgcgtcacggtttggacagaagacgagtgttgcgggacgaggatttcgaagttgatgaagtgacagggatcagtcctgccagggcacacgtggctgcagccaaccttgtatcggcttacgaacagacagtaaaggaagagcgtaatttccaaaagtcttttaataatcatgtgcgaaccctcattgcccgcgaagaagtcacccttggtttgatgcatttgtgggatttgatggaagctatcattcagaaccctactagcaaacctctgaccgcacagctgtttctggtggtgcaacacagcagagacaatgaggctttcagagaggcgctgctcaacatcaccgaacccgaggggagatggttgtatgatcttatcaacattctacagagtatcatagtgcaggagcggagcctgggcctggccgagaaggtggctgccatcaattactcggttttgagcttgggaaagtattacgctcgcaagatctacaagactccatacgttcccatagacaaggaggtgaagatagatgggttctacatgcgcatgacgctgaaggtgttgaccctgagcgatgatcttggggtgtaccgcaatgacagaatgcatcgcgcggtgagcgccagcaggaggcgcgagttaagcgacagggaactgatgcacagtttgcaaagagctctaactggagctggaaccgagggtgagaattactttgatatgggagctgacttgcagtggcagcctagtcgcagggctctgaacgccgcgacggcaggatgtgagcttccttacatagaagaggcggatgaaggcgaggaggaagagggcgagtacttggaagactgatggcacaacccgtgttttttgctagatggaacagcaagcaccggatcccgcaatgcgggcggcgctgcagagccagccgtccggcattaactcctcggacgattggacccaggccatgcaacgtatcatggcgttgacgactcgcaaccccgaagcctttagacagcaaccccaggccaaccgtctatcggccatcatggaagctgtagtgccttcccgctctaatcccactcatgagaaggtcctggccatcgtgaacgcgttggtggagaacaaagctattcgtccagatgaggccggactggtatacaacgctctcttagaacgcgtggctcgctacaacagtagcaatgtgcaaaccaatttggaccgtatgataacagatgtacgcgaagccgtgtctcagcgcgaaaggttccagcgcgatgccaacctgggttcgctggtggcgttaaatgctttcttgagtactcagcctgctaatgtgccgcgtggtcaacaggattatactaactttttaagtgctttgagactgatggtatcagaagtacctcagagcgaagtatatcagtccggtcctgattacttctttcagactagcagacagggcttgcagacggtaaatctgagccaagcttttaaaaaccttaaaggtttgtggggagtgcatgccccggtaggagaaagagcaaccgtgtctagcttgttaactccgaactcccgcctattattactgttggtagctcctttcaccgacagcggtagcatcgaccgtaattcctatttgggttacctactaaacctgtatcgcgaagccatagggcaaagtcaggtggacgagcagacctatcaagaaattacccaagtcagtcgcgctttgggacaggaagacactggcagtttggaagccactctgaacttcttgcttaccaatcggtctcaaaagatccctcctcaatatgctcttactgcggaggaggagaggatccttagatatgtgcagcagagcgtgggattgtttctgatgcaagagggggcaactccgactgcagcactggacatgacagcgcgaaatatggagcccagcatgtatgccagtaaccgacctttcattaacaaactgctggactacttgcacagagctgccgctatgaactctgattatttcaccaatgccatcttaaacccgcactggctgcccccacctggtttctacacgggcgaatatgacatgcccgaccctaatgacggatttctgtgggacgacgtggacagcgatgttttttcacctctttctgatcatcgcacgtggaaaaaggaaggcggcgatagaatgcattcttctgcatcgctgtccggggtcattggtgctaccgcggctgagcccgagtctgcaagtccttttcctagtctacccttttctctacacagtgtacgtagcagcgaagtgggtagaataagtcgcccgagtttaatgggcgaagaggagtacctaaacgattccttgctcagaccggcaagagaaaaaaatttcccaaacaatggaatagaaagtttggtggataaaatgagtagatggaagacttatgctcaggatcacagagacgagcctgggatcatggggactacaagtagagcgagccgtagacgccagcgccatgacagacagaggggtcttgtgtgggacgatgaggattcggccgatgatagcagcgtattggacttgggtgggagaggaaggggcaacccgtttgctcatttgcgccctcgcttgggtggtatgttgtaaaaaaaaataaaaaagaaaaaactcaccaaggccatggcgacgagcgtacgttcgttcttctttattatctgtgtctagtataatgaggcgagtcgtgctaggcggagcggtggtgtatccggagggtcctcctccttcgtacgagagcgtgatgcagcagcagcaggcgacggcggtgatgcaatccccactggaggctccctttgtgcctccgcgatacctggcacctacggagggcagaaacagcattcgttactcggaactggcacctcagtacgataccaccaggttgtatctggtggacaacaagtcggcggacattgcttctctgaactatcagaatgaccacagcaacttcttgaccacggtggtgcaaaacaatgactttacccctacggaagccagcacccagaccattaactttgatgaacgatcgcggtggggcggtcagctaaaaaccatcatgcatactaacatgcccaacgtgaacgagtatatgtttagtaacaagttcaaagcgcgtgtgatggtgtccagaaaacctcctgagggtgttagagtagacgataattatgatcataagcaagatattctaaaatacgagtggttcgagtttactttgccagaaggcaacttttcggtcactatgactatcgacttgatgaacaatgccatcatagacaattacttgaaagtgggcagacagaatggagtgttggaaagtgacattggtgttaagttcgacactaggaacttcaagttgggatgggatccagaaactaagttgatcatgcctggggtttacacctatgaggccttccatcctgacatcgtattgctgcctggctgcggagtggactttaccgaaagccgtctgagcaaccttcttggcattagaaagaaacacccattccaagagggttttaagatcttgtatgaggatttagaaggaggaaatattccagcccttttggatgtagatgcttatgagaacagcaagaaagatcaaaaagccaaaatagaagctgctgcagaagctaaagcaaacatagttgccaacgatccggtaagggtggctaacgctagtgaaatcaggggagacagttttgccgcaacatccgttccgactaaagaatcattattggatgatgtgtctcaaaacatagagttaaaactcactattaagcctgtggaaaaagatggcaaaaacagaagttacaatgtgttggaagataaaatcaacacggcctatcgcagttggtacctttcgtacaattatggcgaccccgaaaaaggagtgcgttcctggacattgctcaccacctcagatgtcacctgcggagcggagcaggtctactggtcgcttccagacatgatgcaggatcctgtcactttccgctccactagacaagtcagtaactaccctgtggtgggtgcagagcttatgcccgtcttttcaaagagcttctacaacgaacaagctgtgtactcccagcagctccgccagtccacctcgcttacgcacgtcttcaaccgctttcctgagaaccagattttaatccgtccgccggcgcccacaattaccaccgtcagtgaaaacgttcctgctctcacagatcacgggaccctgccgttgcgcagcagtatccggggagtccaacgtgtgaccgttactgacgccagacgccgcacctgtccctacgtgtacaaggcactgggcatagtcgcaccgcgcgtcctttcaagccgcactttctaaaaaaaaaaaaaaaatgtccgttcttatctcgcccagtaataacaccggttggggtctgcgcgctcccagcaagatgtacggaggcgcacgcaaacgttctacccaacatcccgtgcgtgttcgcgggcattttcgcgctccatggggtgccctcaagggccgcactcgcgttcgaaccaccgtcgatgatgtaatcgatcaggtggttgccgacgcccgtaattatactcctactgcgcctacatctactgtggacgcagttattgacagtgtagtggctgacgctcgcaactatgctcgacgtaagagccggcgaaggcgcattgccagacgtcaccgagctaccactgccatgcgagcagcaagagctctgctacgaagagctagacgcgtggggcgaagagccatgcttagggcggccagacgtgcagcttcgggcgccagcgccggcaggtcccgcaggcaagcagccgctgtcgcagcggcgactattgccgacatggcccaatcgcgaagaggcaatgtatactgggtgcgtgacgctgccaccggtcaacgtgtacccgtgcgcacccgtccccctcgcacttagaagatactgagcagtctccgatgttgtgtcccagcggcgaggatgtccaagcgcaaatacaaggaagaaatgctgcaggttatcgcacctgaagtctacggccaaccgttgaaggatgaaaaaaaaccccgcaaaatcaagcgggtaaaaaaggacaaaaaagaagaggaagatggcgatgatgggctggcggagtttgtgcgcgagtttgccccacggcgacgcgtgcaatggcgtgggcgcaaagttcgacatgtgttgagacctggaacttcggtggtctttacacccggcgagcgttcaagcgctacttttaagcgttcctatgatgaggtgtacggggatgatgatattcttgagcaggcagctgaccgattaggcgagtttgcttatggcaagcgtagtagaataaatcccaaggatgaaacagtgtccatacccttggatcatggaaatcccacccctagtcttaaaccggtcactttgcagcaagtgttacccgtaactccgcgaacaggtgttaaacgcgaaggtgaagatttgtatcccactatgcaactgatggtgcccaaacgccagaagttggaggacgttttggagaaagtaaaagtggatccagatattcaacctgaggttaaagtgagacccattaagcaggtagcgcctggtctgggagtacaaactgtagacattaaaattcccactgaaagtatggaagtgcaaactgaacccgcaaagcctactgccacctccactgaagtgcaaacggacccatggatgcccatgcctattacaactgacgccgtcggtcccactcgaagatcccgacgaaagtacggtccagcaagtctgttgatgcccaactatgtcgtacacccatctattattcctactcctggttaccgaggcactcgctactatcgcagccgaaacagtacttcccgccgtcgccgcaagacacctgcaaatcgcagtcgtcgccgtagacgcacaagcaaaccgattcccggcgccctggtgcggcaagtgtaccgcaatggtagtgcggaacctttgacactgccgcgtgcgcgttaccatcctagtatcatcacttaatcaatgttgccgctgcctccttgcagatatggccctcacttgtcgccttcgcgttcccatcactggttaccgaggaagaaactcgcgccgtagaagagggatgttggggcgcggaatgcgacgctacaggcgacggcgtgctatccgcaagcaattgcggggtggttttttgccagccttaattccaattatcgctgctgcgattggcgcaataccaggcatagcttccgtggcggttcaggcctcgcaacgacattgacattggaaaaaaaaaaaacgtataaataaaaaatacaatggactctgacactcctggtactgtgactatgttttcttagagatggaagacatcaatttttcatccttggctccgcgacacggcacgaagccgtacatgggcacctggagcgacatcggcacgagccaactgaacgggggcgccttcaattggagcagtatctggagcgggcttaaaaattttggctcaaccataaaaacatacgggaacaaagcttggaacagcagtacaggacaggcgcttagaaataaacttaaagaccagaacttccaacaaaaagtagtcgatgggatagcttccggtatcaatggagtggtagatttggctaaccaggctgtgcagaaaaagataaacagtcgtttggacccgccgccagcaaccccaggtgaaatgcaagtggaggaagaaattcctccgccagaaaaacgaggcgacaagcgtccgcgtcccgatttggaagagacgctggtgacgcgcgtagatgaaccgccttcttatgaggaagcaacgaagcttggaatgcccaccactagaccgatagcccctatggccaccggggtgatgaaaccttctcagttgcatcgacccgtcaccttggatttgccccctcctcctgctgctactgctgtacccgcttctaagcctgtcgctgccccgaaaccagtcgccgtagccaggtcacgtcccgggggcgctcctcgtccaaatgcacactggcaaaatactctgaacagcatcgtgggtctaggcgtgcaaagtgtaaaacgccgtcgctgcttttaattaaatatggagtagcgcttaacttgcctatctgtgtatatgtgtcattacacgccgtcacagcatcagaggaaaaaaggaagaggtcgtgcgtcgacgctgagttactttcaagatggccaccccatcgatgctgccccaatgggcatacatgcacatcgccggacaggatgcttcggagtacctgagtccgggtctggtgcagttcgcccgcgccacagacacctacttcaatctgggaaataagtttagaaatcctaccgtagcgccgacccacgatgtgaccaccgatcgtagccagcggctcatgttgcgcttcgtgcccgttgaccgggaggacaatacatactcttacaaagtgcggtacaccctggccgtgggcgacaacagagtgctggatatggccagcacgttctttgacattaggggcgtgttggacagaggtcccagttttaaaccctattctggtacggcttacaactccctggctcctaaaggcgctccaaatgcatctcagtggttggataagggagttacaagcactggcctagtggacgacggcaatactgatgatggggaagaagccaaaaaagcaacatacacttttggtaatgctccagtaaaagccgaggctgaaatcacaaaagacggattgccggtgggcttggaagtttcaactgaaggtcctaaaccaatctatgctgataagctttatcagccagaacctcaagtgggagacgaaacttggactgacctagacggaaaaaccgaagagtatggagggagggttcttaaacctgaaactaaaatgaaaccctgctacggatcttttgctaaacctactaatattaaaggaggtcaggcaaaggtaaaaccaaaagaagacgatggcactaacaacatcgagtatgacattgacatgaacttctttgacttaagatcacaaagatcagaactcaaacctaaaattgtaatgtatgcagaaaatgtggacctggaatgtccagatactcatgttgtgtacaaacctggagtttcagatgctagttctgagaccaatcttggacaacagtctatgcccaacagacccaactacattggcttcagagataacttcatcggacttatgtactataacagtactggcaacatgggggtactggctggccaagcgtctcagttgaatgcagtggttgacttgcaggacagaaacacagaactgtcttaccaactcttgcttgactctctgggcgacagaaccagatactttagcatgtggaatcaggctgtggacagttatgatcctgatgtacgtgttattgaaaatcatggtgtggaagatgaacttcccaactattgttttccgttggatggtgtcggtccgcgaacagatagttacaaggagattaagccaaatggagaccaatctacttggacaaatgtagacccaactggcagcagtgaacttgctaagggaaatccatttgccatggaaattaaccttcaagccaatctatggcgaagtttcctttattccaatgtggctctatatctcccagactcgtacaaatacaccccgtccaatgtcactcttccagaaaacaaaaacacctacgactacatgaacgggcgggtggtgccgccatctctagtagacacctatgtgaacattggtgccaggtggtctctggatgccatggacaatgtcaacccattcaaccaccaccgtaacgctggcttgcgttaccgatccatgcttctgggtaacggacgttatgtgcctttccacatacaagtgcctcaaaaattcttcgctgttaaaaacctgctgcttctcccaggctcctacacttatgagtggaactttaggaaggatgtaaacatggttctacagagttccctcggtaacgacctacgggtagatggcgccagcatcagttttacgagcatcaacctctatgctacttttttccccatggctcacaacaccgcttccacccttgaagccatgctgcggaatgacaccaatgatcagtcattcaacgactacctatctgcagctaacatgctctaccccattcctgccaatgcaaccaatattcccatttccattccttctcgcaactgggcggctttcagaggctggtcatttaccagactgaaaaccaaagaaactccctctttggggtctggatttgacccctacttcgtctattctggttctattccctacctggatggtaccttctacctgaaccacacttttaagaaggtttccatcatgtttgactcttcagtgagctggcctggaaatgacaggttactatctcctaacgaatttgaaataaagcgcactgtggatggcgaaggctacaacgtagcccaatgcaacatgaccaaagactggttcttggtacagatgctcgccaactacaacatcggctatcagggcttctacattccagaaggatacaaagatcgcatgtattcatttttcagaaacttccagcccatgagcaggcaggtggttgatgaggtcaattacaaagacttcaaggccgtcgccataccctaccaacacaacaactctggctttgtgggttacatggctccgaccatgcgtcaaggtcaaccctatcccgctaactatccctatccactcattggaacaactgccgtaaatagtgttacgcagaaaaagttcttgtgtgacagaaccatgtggcgcataccgttctcaagcaacttcatgtctatgggagcccttacagacttgggacagaacatgctctatgccaactcagctcatgctctggacatgacctttgaggtggatcccatggatgagcccaccctgctttatcttctcttcgaagttttcgacgtggtcagagtgcatcagccacaccgcggcatcatcgaggcagtctacctgcgtacaccgttctcggccggtaacgctaccacgtaagaagcttcttgcttcttgcaaacagcagctgcaaccatggcctgcggatcccaaaacggctccagcgagcaagagctcagagccattgtccaagacctgggttgcggaccatattttttgggaacctttgataagcgcttcccggggttcatggcccccgataagctcgcctgtgccattgtaaatacggccggacgtgagacggggggagagcactggttggctttcggttggaacccacgttctaacacctgctacctttttgatccttttggattctcggatgatcgtctcaaacagatttaccagtttgaatatgagggtctcctgcgccgcagcgctcttgctaccaaggaccggtgtattacgctggaaaaatctacccagaccgtgcagggcccccgttctgccgcctgcggacttttctgctgcatgttccttcatgcctttgtgcactggcctgaccgtcccatggacggaaaccccaccatgaaattgctaactggagtgccaaacaacatgcttcattctcctaaagtccagcccaccctgtgtgacaatcaaaaagcactctaccattttctcaatacccattcgccttattttcgctctcatcgtacacacatcgaaagggccactgcgttcgaccgtatggatgtgcaataatgattcatgtaaacaacgtgttcaataaacagcactttattttttacatgtatcgaggctctggattacttatttatttacaagtcgaatgggttctgacgagaatcagaatgacccgcaggcagtgatacgttgcggaactgatacttgggttgccacttgaattcgggaatcaccaacttgggaaccggtatatcgggcaggatgtcactccacagctttctggtcagctgcaaagctcccagcaggtcaggagccgaaatcttgaaatcacaattaggaccagtgctctgagcgcgagagttgcggtacaccggattgcagcactgaaacaccatcagcgacggatgtcttacgcttgccagcacggtgggatctgcaatcatgcccacatccagatcttcagcattggcaatgctgaacggggtcatcttgcaggtctgcctacccatggcgggcacccaattaggcttgtggttacaatcgcagtgcagggggatcagtatcatcttggcctgatcctgtctgattcctggatacacggctctcatgaaagcatcatattgcttgaaagcctgctgggctttactaccctcggtataaaacatcccgcaggacctgctcgaaaactggttagctgcgcagccggcatcattcacacagcagcgggcgtcattgttggctatttgcaccacacttctgccccagcggttttgggtgattttggttcgctcgggattctccttcaaggctcgttgtccgttctcgctggccacatccatctcgataatctgctccttctgaatcataatattgccatgcaagcacttcagcttgccctcataatcattgcagccatgaggccacaacgcacagcctgtacattcccaattatggtgggcgatctgagaaaaagaatgtatcattccctgcagaaatcttcccatcatcgtgctcagtgtcttgtgactagtgaaagttaactggatgcctcggtgctcctcgttcacgtactggtgacagatgcgcttgtattgttcgtgctgctcaggcattagtttaaaagaggttctaagttcgttatccagcctgtacttctccatcagcagacacatcacttccatgcctttctcccaagcagacaccaggggcaagctaatcggattcttaacagtgcaggcagcagctcctttagccagagggtcatctttggcgatcttctcaatgcttcttttgccatccttctcaacgatgcgcacgggcgggtagctgaaacccactgctacaagttgcgcctcttctctttcttcttcgctgtcttgactgatgtcttgcatggggacatgtttggtcttccttggcttctttttcgggggtatcggaggaggaggactgtcgctccgttccggagacagggaggattgtgacgtttcgctcaccattaccaactgactgtcggtagaagaacctgaccccacacggcgacaggtgtttctcttcgggggcagaggtggaggcgattgcgaagggctgcggtccgacctggaaggcggatgactggcagaaccccttccgcgttcgggggtgtgctccctgtggcggtcgcttaactgatttccttcgcggctggccattgtgttctcctaggcagagaaacaacagacatggaaactcagccattgctgtcaacatcgccacgagtgccatcacatctcgtcctcagcgacgaggaaaaggagcagagcttaagcattccaccgcccagtcctgccaccacctctaccctagaagataaggaggtcgacgcatctcatgacatgcagaataaaaaagcgaaagagtctgagccagacatcgaacaagacccgggctatgtgacaccggtggaacacgaggaagagttgaaacgctttctagagagagaggatgaaaactgcccaaaacagcaagcggataactatcaccaagatgctggaaatagggatcagaacaccgactacctcatagggcttgacggggaagacgcgctccttaaacatctagcaagacagtcactcatagtcaaggatgcattattggacagaactgaagtgcccatcagtgtcgaagagctcagccgcgcctacgagcttaacctattttcacctcgtactccccccaaacgtcagccaaacggcacctgcgagccaaatcctcgcttaaacttttatccagcttttgctgtgccagaagtactggctacctatcacatcttttttaaaaatcaaaaaattccagtctcctgccgcgctaatcgcacccgcgccgatgccctactcaatctgggacctggttcacgcttacctgatatagcttccttggaagaggttccaaagatcttcgagggtctgggcaataatgagactcgggccgcaaatgctctgcaaaagggagaaaatggcatggatgagcatcacagcgttctggtggaattggaaggcgataatgccagactcgcagtactcaagcgaagcgtcgaggtcacacactttgcataccccgctgtcaacctgccccctaaagtcatgacggccgtcatggaccagttactcattaagcgcgcaagtcccctttcagaagacatgcatgacccagatgcctgtgatgagggtaaaccagtggtcagtgatgagcagctaacccgatggctgggcaccgactctccccgggatttggaagagcgtcgcaagcttatgatggccgtggtgctggttaccgtagaactagagtgtcttcggcgtttctttaccgattcagaaaccttgcgcaaactcgaagagaatctgcactacacttttagacacggctttgtgcggcaggcatgcaagatatctaacgtggaactcaccaacctggtttcctacatgggtattctgcatgagaatcgcctaggacaaagcgtgctgcacagcacccttaagggggaagcccgccgtgattacatccgcgattgtgtttatctctacctgtgccacacgtggcaaaccggcatgggtgtatggcagcaatgtttagaagaacagaacctgaaagagctaaacaagctcttacagaaatctcttaaggttctgtggacagggttcgacgagcgcaccgtcgcttccgacctggcagacctcatcttcccagagcgtctcagggttactttgcgaaacggactgcctgactttatgagccagagcatgcttaacaattttcgctctttcatcctggaacgctccggtatcctgcccgccacctgctgcgcactgccctccgactttgtgcctctcacctaccgcgaatgccccccgccgctatggagtcactgctacctgttccgtctggccaactacctctcctaccactcggatgtgatcgaggatgtgagcggagacggcttgctggagtgtcactgccgctgcaatctgtgcacgccccaccggtccctagcttgcaacccccagttgatgagcgaaacccagataataggcacctttgaattgcaaggccccagcagccaaggcgatgggtcttctcctgggcaaagtttaaaactgaccccgggactgtggacctccgcctacttgcgcaagtttgccccggaagattaccacccctatgaaatcaagttctatgaggaccaatcacagcctccgaaagccgaactttcggcctgcgtcatcacccagggggcaattctggcccaattgcaagccatccaaaaatcccgccaagaatttctactgaaaaagggtaagggggtctaccttgacccccagaccggcgaggaactcaacacaaggttccctcaggatgtcccaacgacgagaaagcaagaagttgaaggtgcagccgccgcccccagaagatatggaggaagattgggacagtcaggcagaggaagcggaggaggaggacagtctggaggacagtctggaggaagacagtttggaggaggaaaacgaggaggcagaggaggtggaagaagtaaccgccgacaaacagttatcctcggctgcggagacaagcaacagcgctaccatctccgctccgagtcgaggaacccggcggcgtcccagcagtagatgggacgagaccggacgcttcccgaacccaaccagcgcttccaagaccggtaagaaggatcggcagggatacaagtcctggcgggggcataagaatgccatcatctcctgcttgcatgagtgcgggggcaacatatccttcacgcggcgctacttgctattccaccatggggtgaactttccgcgcaatgttttgcattactaccgtcacctccacagcccctactatagccagcaaatcccggcagtctcgacagataaagacagcggcggcgacctccaacagaaaaccagcagcggcagttagaaaatacacaacaagtgcagcaacaggaggattaaagattacagccaacgagccagcgcaaacccgagagttaagaaatcggatctttccaaccctgtatgccatcttccagcagagtcggggccaagagcaggaactgaaaataaaaaaccgatctctgcgttcgctcaccagaagttgtttgtatcacaagagcgaagatcaacttcagcgcactctcgaggacgccgaggctctcttcaacaagtactgcgcgctgactcttaaagagtaggcagcgaccgcgcttattcaaaaaaggcgggaattacatcatcctcgacatgagtaaagaaattcccacgccttacatgtggagttatcagccccaaatgggattggcggcaggcgcctcccaggactactccacccgcatgaattggctcagcgccgggccttctatgatttctcgagttaatgatatacgcgcctaccgaaaccaaatacttttggaacagtcagctcttaccaccacgccccgccaacaccttaatcccagaaattggcccgccgccctagtgtaccaggaaagtcccgctcccaccactgtattacttcctcgagacgcccaggccgaagtccaaatgactaatgcaggtgcgcagttagcgggcggctccaccctatgtcgtcacaggcctcggcataatataaaacgcctgatgatcagaggccgaggtatccagctcaacgacgagtcggtgagctctccgcttggtctacgaccagacggaatctttcagattgccggctgcgggagatcttccttcacccctcgtcaggctgttctgactttggaaagttcgtcttcgcaaccccgctcgggcggaatcgggaccgttcaatttgtggaggagtttactccctctgtctacttcaaccccttctccggatctcctgggcactacccggacgagttcataccgaacttcgacgcgattagcgagtcagtggacggctacgattgatgtctggtgacgcggctgagctatctcggctgcgacatctagaccactgccgccgctttcgctgctttgcccgggaactcattgagttcatctacttcgaactccccaaggatcaccctcaaggtccggcccacggagtgcggattactatcgaaggcaaaatacactctcgcctgcaacgaattttctcccagcggcccgtgctgatcgagcgagaccagggaaacaccacggtttccatctactgcatttgtaatcaccccggattgcatgaaagcctttgctgtcttatgtgtactgagtttaataaaaactgaattaagactctcctacggactgccgcttcttcaacccggattttacaaccagaagaacgaaacttttcctgtcgtccaggactctgttaacttcacctttcctactcacaaactagaagctcaacgactacaccgcttttccagaagcattttccctactaatactactttcaaaaccggaggtgagctccaaggtcttcctacagaaaacccttgggtggaagcgggccttgtagtgctaggaattcttgcgggtgggcttgtgattattctttgctacctatacacaccttgcttcactttcctagtggtgttgtggtattggtttaaaaaatggggcccatactagtcttgcttgttttactttcgcttttggaaccgggttctgccaattacgatccatgtctagacttcgacccagaaaactgcacacttacttttgcacccgacacaagccgcatctgtggagttcttattaagtgcggatgggaatgcaggtccgttgaaattacacacaataacaaaacctggaacaataccttatccaccacatgggagccaggagttcccgagtggtacactgtctctgtccgaggtcctgacggttccatccgcattagtaacaacactttcattttttctgaaatgtgcgatctggccatgttcatgagcaaacagtattctctatggcctcctagcaaggacaacatcgtaacgttctccattgcttattgcttgtgcgcttgccttcttactgctttactgtgcgtatgcatacacctgcttgtaaccactcgcatcaaaaacgccaataacaaagaaaaaatgccttaacctctttctgtttacagacatggcttctcttacatctctcatatttgtcagcattgtcactgccgctcacggacaaacagtcgtctctatccctctaggacataattacactctcataggacccccaatcacttcagaggtcatctggaccaaactgggaagcgttgattactttgatataatctgcaacaaaacaaaaccaataatagtaacttgcaacatacaaaatcttacattgattaatgttagcaaagtttacagcggttactattatggttatgacagatacagtagtcaatatagaaattacttggttcgtgttacccagttaaaaaccacgaaaatgccaaatatggcaaagattcgatccgatgacaattctctagaaacttttacatctcccaccacacccgacgaaaaaaacatcccagattcaatgattgcaattgttgcagcggtggcagtggtgatggcactaataataatatgcatgcttttatatgcttgtcgctacaaaaagtttcatcctaaaaaacaagatctcctactaaggcttaacatttaatttctttttatacagccatggtttccactaccacattccttatgcttactagtcttgcaactctgacttctgctcgctcacacctcactgtaactataggctcaaactgcacactaaaaggacctcaaggtggtcatgtcttttggtggagaatatatgacaatggatggtttacaaaaccatgtgaccaacctggtagatttttctgcaacggcagagacctaaccattatcaacgtgacagcaaatgacaaaggcttctattatggaaccgactataaaagtagtttagattataacattattgtactgccatctaccactccagcaccccgcacaactactttctctagcagcagtgtcgctaacaatacaatttccaatccaacctttgccgcgcttttaaaacgcactgtgaataattctacaacttcacatacaacaatttccacttcaacaatcagcattatcgctgcagtgacaattggaatatctattcttgtttttaccataacctactacgcctgctgctatagaaaagacaaacataaaggtgatccattacttagatttgatatttaatttgttctttttttttttatttacagtatggtgaacaccaatcatggtacctagaaatttcttcttcaccatactcatttgtgcatttaatgtttgcgctactttcacagcagtagccacagcaaccccagactgtataggagcatttgcttcctatgcactttttgcttttgttacttgcatctgcgtatgtagcatagtctgcctggttattaattttttccaacttctagactggatccttgtgcgaattgcctacctgcgccaccatcccgaataccgcaaccaaaatatcgcggcacttcttagactcatctaaaaccatgcaggctatactaccaatatttttgcttctattgcttccctacgctgtctcaaccccagctgcctatagtactccaccagaacaccttagaaaatgcaaattccaacaaccgtggtcatttcttgcttgctatcgagaaaaatcagaaattcccccaaatttaataatgattgctggaataattaatataatctgttgcaccataatttcatttttgatataccccctatttgattttggctggaatgctcccaatgcacatgatcatccacaagacccagaggaacacattcccctacaaaacatgcaacatccaatagcgctaatagattacgaaagtgaaccacaacccccactactccctgctattagttacttcaacctaaccggcggagatgactgaaacactcaccacctccaattccgccgaggatctgctcgatatggacggccgcgtctcagaacagcgacttgcccaactacgcatccgccagcagcaggaacgcgcggccaaagagctcagagatgtcatccaaattcaccaatgcaaaaaaggcatattctgtttggtaaaacaagccaagatatcctacgagatcaccgctactgaccatcgcctctcttacgaacttggcccccaacgacaaaaatttacctgcatggtgggaatcaaccccatagttatcacccagcaaagtggagatactaagggttgcattcactgctcctgcgattccatcgagtgcacctacaccctgctgaagaccctatgcggcctaagagacctgctaccaatgaattaaaaaatgattaataaaaaatcacttacttgaaatcagcaataaggtctctgttgaaattttctcccagcagcacctcacttccctcttcccaactctggtattctaaaccccgttcagcggcatactttctccatactttaaaggggatgtcaaattttagctcctctcctgtacccacaatcttcatgtctttcttcccagatgaccaagagagtccggctcagtgactccttcaaccctgtctacccctatgaagatgaaagcacctcccaacacccctttataaacccagggtttatttccccaaatggcttcacacaaagcccagacggagttcttactttaaaatgtttaaccccactaacaaccacaggcggatctctacagctaaaagtgggagggggacttacagtggatgacactgatggtaccttacaagaaaacatacgtgctacagcacccattactaaaaataatcactctgtagaactatccattggaaatggattagaaactcaaaacaataaactatgtgccaaattgggaaatgggttaaaatttaacaacggtgacatttgtataaaggatagtattaacaccttatggactggaataaaccctccacctaactgtcaaattgtggaaaacactaatacaaatgatggcaaacttactttagtattagtaaaaaacggagggcttgttaatggctacgtgtctctagttggtgtatcagacactgtgaaccaaatgttcacacaaaagacagcaaacatccaattaagattatattttgactcttctggaaatctattaactgatgaatcagacttaaaaattccacttaaaaataaatcttctacagcgaccagtgaaactgtagccagcagcaaagcctttatgccaagtactacagcttatcccttcaacaccactactagggatagtgaaaactacattcatggaatatgttactacatgactagttatgatagaagtctatttcccttgaacatttctataatgctaaacagccgtatgatttcttccaatgttgcctatgccatacaatttgaatggaatctaaatgcaagtgaatctccagaaagcaacatagctacgctgaccacatccccctttttcttttcttacattacagaagacgacaactaaaataaagtttaagtgtttttatttaaaatcacaaaattcgagtagttattttgcctccaccttcccatttgacagaatacaccaatctctccccacgcacagctttaaacatttggataccattagagatagacattgttttagattccacattccaaacagtttcagagcgagccaatctggggtcagtgatagataaaaatccatcgcgatagtcttttaaagcgctttcacagtccaactgctgcggatgcgaatccggagtctggatcacggtcatctggaagaagaacgatgggaatcataatccgaaaacggtatcggacgattgtgtctcatcaaacccacaagcagccgctgtctgcgtcgctccgtgcaactgctgtttatgggatcagggtccacagtgtcctgaagcatgattttaatagcccttaacatcaactttctggtgcgatgcgcgcagcaacgcattctgatttcactcaaatctttgcagtaggtacaacacattattacaatattgtttaataaaccataattaaaagcgctccagccaaaactcatatctgatataatcgcccctgcatgaccatcataccaaagtttaatataaattaaatgacgttccctcaaaaacacactacccacatacatgatctcttttggcatgtgcatattaacaatctgtctgtaccatggacaacgttggttaatcatgcaacccaatataaccttccggaaccacactgccaacaccgctcccccagccatgcattgaagtgaaccctgctgattacaatgacaatgaagaacccaattctctcgaccgtgaatcacttgagaatgaaaaatatctatagtggcacaacatagacataaatgcatgcatcttctcataatttttaactcctcaggatttagaaacatatcccagggaataggaagctcttgcagaacagtaaagctggcagaacaaggaagaccacgaacacaacttacactatgcatagtcatagtatcacaatctggcaacagcgggtggtcttcagtcatagaagctcgggtttcattttcctcacaacgtggtaactgggctctggtgtaagggtgatgtctggcgcatgatgtcgagcgtgcgcgcaaccttgtcataatggagttgcttcctgacattctcgtattttgtatagcaaaacgcggccctggcagaacacactcttcttcgccttctatcctgccgcttagcgtgttccgtgtgatagttcaagtacagccacactcttaagttggtcaaaagaatgctggcttcagttgtaatcaaaactccatcgcatctaattgttctgaggaaatcatccacggtagcatatgcaaatcccaaccaagcaatgcaactggattgcgtttcaagcaggagaggagagggaagagacggaagaaccatgttaatttttattccaaacgatctcgcagtacttcaaattgtagatcgcgcagatggcatctctcgcccccactgtgttggtgaaaaagcacagctaaatcaaaagaaatgcgattttcaaggtgctcaacggtggcttccaacaaagcctccacgcgcacatccaagaacaaaagaataccaaaagaaggagcattttctaactcctcaatcatcatattacattcctgcaccattcccagataattttcagctttccagccttgaattattcgtgtcagttcttgtggtaaatccaatccacacattacaaacaggtcccggagggcgccctccaccaccattcttaaacacaccctcataatgacaaaatatcttgctcctgtgtcacctgtagcgaattgagaatggcaacatcaattgacatgcccttggctctaagttcttctttaagttctagttgtaaaaactctctcatattatcaccaaactgcttagccagaagccccccgggaacaagagcaggggacgctacagtgcagtacaagcgcagacctccccaattggctccagcaaaaacaagattggaataagcatattgggaaccgccagtaatatcatcgaagttgctggaaatataatcaggcagagtttcttgtaaaaattgaataaaagaaaaatttgccaaaaaaacattcaaaacctctgggatgcaaatgcaataggttaccgcgctgcgctccaacattgttagttttgaattagtctgcaaaaataaaaaaaaaaacaagcgtcatatcatagtagcctgacgaacaggtggataaatcagtctttccatcacaagacaagccacagggtctccagctcgaccctcgtaaaacctgtcatggtgattaaacaacagcaccgaaagttcctcgcggtgaccagcatgaataattcttgatgaagcatacaatccagacatgttagcatcagttaacgagaaaaaacagccaacatagcctttgggtataattatgcttaatcgtaagtatagcaaagccacccctcgcggatacaaagtaaaaggcacaggagaataaaaaatataattatttctctgctgctgttcaggcaacgtcgcccccggtccctctaaatacacatacaaagcctcatcagccatggcttaccagacaaagtacagcgggcacgcacaagctctaaagtcactctccaacctctccacaatatatatacacaagccctaaactgacgtaatgggagtaaagtgtaaaaaatcccgccaaacccaacacacaccccgaaactgcgtcaccagggaaaagtacagtttcacttccgcaatcccaacaagcgtcacttcctctttctcacggtacgtcacatcccattaacttgcaacgtcattttcccacggccgcgccgccccgtttagccgttaaccccacagccaatcaccacacaccccacaatttttaaaatcacctcatttacatattggcaccattccatctataaggtatattattgatgatg

SEQ ID NO: 152 - DNA, 35213 bp, Unknown
  Description of Unknown: Human adenovirus D37 sequence
catcatcataatataccccacaaagtaaacaaaagttaatatgcaaatgagcttttgaattttaacggttttggggcggagccaacgctgattggacgagaagcggtgatgcaaataacgtcacgacgcacggctaacggccggcgcggaggcgtggcctaggccggaagcaagtcgcggggctaatgacgtataaaaaagcggactttagacccggaaacggccgattttcccgcggccacgcccggatatgaggtaattctgggcggatgcaagtgaaattaggtcattttggcgccaaaactgaatgaggaagtgaaaagtgaaaaatacctgtcccgcccagggcggaatatttaccgagggccgagagactttgaccgattacgtggggtttcgattgcggtgtttttttcgcgaatttccgcgtccgtgtgaaagtccggtgtttatgtcacagatcagctgatccacagggtatttaaaccagttgagcccgtcaagaggccactcttgagtgccagcgagtagagatttctctgagctccgctcccaaagtgtgagaaaaatgagacacctgcgcctcctgtcttcaactgtgcctattaacatggccgcattattgctggaggactatgtgagtacagtattggaggacgaactacatccatctccatttgagctgggacctacacttcaggacctttatgatttggaggtagatgcccatgatgacgacccaaacgaagaggctgtgaatttaatatttccagaatctctgattcttcaggctgacatagccagcgaagctgtacctacaccacttcatacaccgactttgtcacccatacctgaattggaagaggaggacgagttagacctccgatgttatgaggaaggttttcctcccagcgattcagaggacgaacagggtgagcagagcatggctctaatctcagaatatgcttgtgtggttgtggaagagcattttgtgttggacaatcctgaggtgcccgggcaaggctgtagatcctgccagtaccaccgggataagaccggagacacaaacgcctcctgcgctctgtgttacatgaaaaagaacttcagctttatttacagtaagtggagtgaatgtgagagaggctgagtgcttaacacataactgggtgatgcttaaacagctgtgctaagtgtggtttatttttgtttctaggtccggtgtcagaggatgagtcatcaccctcagaagaaaaccacccgtgtccccctgagctgtcaggcgaaacgcccctgcaagtgcacaaacccaccccagtcagacccagtggcgagaggcgagcagctgttgaaaaaattgaggacttgttacatgacatgggtggggatgaacctttggacctgagcttgaaacgccccaggaactaggcgcagctgtgcttagtcatgtgtaaataaagttgtacaataaaagtatatgtgacgcatgcaaggtgtggtttatgactcatgggcggggcttagtcctatataagtggcaacacctgggcactgggcacagaccttcagggagttcctgatggatgtgtggactatccttgcagactttagcaagacacgccggcttgtagaggatagttcagacgggtgctccgggttctggagacactggtttggaactcctctatctcgactggtgtacacagttaagaaggattataacgaggaatttgaaaatctttttgctgattgctctggcctgctagattctctgaatctcggccaccagtcccttttccaggaaagggtactccacagccttgatttttccagcccagggcgcactacagccggggttgcttttgtggtttttctggttgacaaatggagccagaacacccaactgagcaggggctacattctggacttcgcagccatgcacctgtggagggcatgggtgaggcagcggggacagagaatcttgaactactggcttatacagccagcagctccgggtcttcttcgtctacacagacaaacatccatgttggaggaagaaatgaggcaggccatggacgagaacccgaggagcggcctggaccctccgtcggaagaggagctggattgaatcaggtatccagcttgtacccagagcttagcaaggtgctgacatccatggctaggggagtgaagagggagaggagcgatgggggcaataccgggatgatgaccgagctgacggccagcctgatgaatcgcaagcgcccagagcgcattacctggcacgagctacagatggagtgcagggatgagttgggcctgatgcaggataaatatggcctggagcagataaaaacacattggttgaacccagatgaggattgggaggaggccattaagaaatatgccaagatagccctgcgcccagattgcaagtacatagtgaccaagaccgtgaatattagacatgcctgctacatttcagggaacggggcagaggtggtcatcgataccctggacaaggccgccttcaggtgttgcatgatgggaatgagagcaggagtgatgaatatgaattccatgatcttcatgaacatgaagttcaatggagagaagtttaatggggtgctgttcatggccaacagccacatgaccctgcatggctgcagtttctttggcttcaacaatatgtgcgccgaggtctggggcgcttccaagatcaggggatgtaagttttatggctgctggatgggcgtggtcggaagacctaagagcgagatgtctgtgaagcagtgtgtgtttgagaaatgctacctgggagtctctaccgagggcaatgctagagtgagacactgctcttccctggatacgggctgcttctgcctggtgaagggtacggcctctctgaagcataatatggtgaagggctgcacagatgagcgcatgtacaacatgctaacatgcgactcgggggtctgtcatatcctgaagaacatccatgtgacctcccaccccagaaagaagtggccagtgtttgagaataacctgctgatcaagtgccatatgcacctgggtgccagaaggggcaccttccagccgtaccagtgcaactttagccagaccaagctgctgttggaaaacgatgccttctccagggtgaacctgaacggcatctttgacatggatgtctcggtgtacaagatcctgagatacgatgagaccaagtccagggtgcgcgcttgcgagtgcgggggcagacacaccaggatgcagccagtggccctggatgtgaccgaggagctgagaccagaccacctggtgatggcctgtaccgggaccgagttcagctccagtggggaggacacagattagaggtaggtttgagtagtgggcgtggctaatgtgagtataaaggcgggtgtcttacgagggtctttttgcttttctgcagacatcatgaacgggaccggcggggccttcgaaggggggctttttagcccttatttgacaacccgcctgccgggatgggccggagttcgtcagaatgtgatgggatctacggtggatgggcgtccagtgcttccagcaaattcctcgaccatgacctacgcgaccgtggggagctcgtcgcttgacagcaccgccgcagccgcggcagccgcagccgccatgacagcgacgagactggcctcgagctatatgcccagcagcggtagcagcccctctgtgcccagttccatcatcgccgaggagaaactgctggccctgctggccgagctggaagccctgagccgccagctggccgccctgacccagcaggtgtccgatctccgcgagcaacagcagcagcaaaataaatgattcaataaacacagattctgattcaaacagcaaagcatctttattatttattttttcgcgcgcggtaggccctggtccacctctcccgatcattgagagtgcggtggattttttccaggacccggtagaggtgggattggatgttgaggtacatgggcatgagcccgtcccgggggtggaggtagcaccactgcatggcctcgtgctctggggtcgtgttgtagataatccagtcatagcaggggcgctgggcgtggtgctggatgatgtccttgaggaggagactgatggccacggggagccccttggtgtaggtgttggcaaagcggttaagctgggagggatgcatgcggggggagatgatgtgcagtttggcctggatcttgaggttggcgatgttgccacccagatcccgccgggggttcatattgtgcaggaccaccagaacggtgtagcccgtgcacttggggaacttatcatgcaacttggaagggaatgcgtggaagaatttggagacgcccttgtgcccgcccaggttttccatgcactcatccatgatgatggcaatgggcccgtgggctgcggctttggcaaaaacgtttctggggtcagagacatcataattatgctcctgggtgagatcatcataagacattttaatgaatttggggcgaagggtgccagattgggggacgatcgttccctcgggccccggggcgaagttcccctcgcagatctgcatctcccaggctttcatctcggagggggggatcatgtccacctgcggggcgatgaaaaaaacggtttccggggcgggggtgatgagctgcgaggagagcaggtttcttaacagctgggacttgccgcacccggtcgggccgtagatgaccccgatgacgggttgcaggtggtagttcaaggagatgcagctgccgtcgtcccggaggaggggggccacctcgttgagcatgtctctcacttggaggttttcccggacgagctcgccgaggaggcggtccccgcccagcgagagcagctcttgcagggaagcaaagtttttcaggggcttgagcccgtcggccatgggcatcttggcaagggtctgcgagaggagctccaggcggtcccatagctcggtgacgtgctctacggcatctcgatccagcagacttcctcgtttcgggggttgggacgactgcgactgtagggcacgagacgatgggcgtccagcgcggccagcgtcatgtccttccagggtctcagggtccgagtgagggtggtctccgtcacggtgaaggggtgggccccgggctgggcgcttgcaagggtgcgcttgagactcatcctgctggtgctgaaacgggcacggtcttcgccctgcgcgtcggcgagatagcagttgaccatgagcttgtagttaagggcctcggcggcgtggcccttggcacggagcttgcctttggaagagcgcccgcaggcgggacagaggagggattgcagggcgtagagcttgggtgcgagaaagacggactcgggagcgaaggcgtccgctccgcagtgggcgcagacggtttcgcactcgacgagccaggtgagctcgggctgctcggggtcaaaaaccagttttcccccgttctttttgatgcgcttcttacctcgcgtctccatgagtctgtgtccgcgttcggtgacaaacaggctgtctgtgtccccgtagacggacttgattggcctgtcctgcaggggcgtcccgcggtcctcctcgtagagaaactcggaccactctgagacaaaggcgcgcgtccacgccaagacaaaggaggccacgtgcgaggggtagcggtcgttgtccaccagggggtccaccttttccaccgtgtgcagacacatgtccccctcctccgcatccaagaaggtgattggcttgtaggtgtaggccacgtgaccgggggtccccgacgggggggtataaaagggggcgggtctgtgctcgtcctcactctcttccgcgtcgctgtccacgagcgccagctgttggggtaggtattccctctcgagagcgggcatgacctcggcactcaggttgtcagtttctagaaacgaggaggatttgatgttggcctgccctgccgcaatgctttttaggagactttcatccatctggtcagaaaagactatttttttattgtcaagcttggtggcaaaggagccatagagggcgttggagagaagcttggcgatggatctcatggtctgatttttgtcacggtcggcgcgctccttggccgcgatgttgagctggacatactcgcgcgcgacacacttccattctgggaagacggtggtgcgctcgtcgggcacgatcctgacgcgccagccgcgattatgcagggtgaccaggtccacgctggtggccacctcgccgcgcaggggctcgttggtccagcagaggcgtccgcccttgcgcgagcagaacgggggcagcacatcaagcagatgctcgtcaggggggtccgcatcgatggtgaagatgcccggacagagttccttgtcaaaataatcgatttttgaggatgcatcatccaaggccatctgccactcgcgggcggccagcgctcgctcgtaggggttgaggggcggaccccagggcatgggatgcgtgagggcggaggcgtacatgccgcagatgtcgtagacatagatgggctccgagaggatgccgatgtaggtgggataacagcgccccccgcggatgctggcgcgcacatagtcatacaactcgtgcgagggggccaagaaagcggggccgagattggtgcgctggggctgctcggcgcggaagacgatctggcgaaagatggcatgcgagttggaggagatggtgggccgttggaagatgttaaagtgggcgtggggcaagcggaccgagtcgcggatgaagtgcgcgtaggagtcttgcagcttggcaacgagctcggcggtgacaaggacgtccatggcgcagtagtccagcgtttcacggatgatgtcataacccgcctcttctttcttctcccacagcgcgcggttgagggcgtactcctcgtcatccttccagtactcccggagcgggaatcctcgatcgtccgcacggtaagagcccagcatgtagaaatggttcacggccttgtagggacagcagcccttctccacggggagggcgtaagcttgagcggccttgcggagcgaggtgtgcgtcagggcgaaggtatccctaaccatgactttcaagaactggtacttgaaatccgagtcgtcgcagccgccgtgctcccagagctcgaaatcggtgcgcttcttcgagagggggttaggcagagcgaaagtgacgtcattgaagagaatcttgcctgcccgcggcatgaaattgcgggtgatgcggaaagggcccggaacggaggctcggttgttgatgacctgggcggcgaggacgatctcgtcgaagccgttgatgttgtgcccgacgatgtagagttccatgaatcgcgggcggcctttgatgtgcggcagctttttgagttcctcgtaggtgaggtcctcggggcattgcaggccgtgctgctcgagcgcccactcctggagatgtgggttggcttgcatgaatgaagcccagagctcgcgggccatgagggtctggagctcgtcgcgaaagaggcggaactgctggcccacggccatcttttctggggtgacgcagtagaaggtgagggggtcccgctcccagcgatcccagcgtaagcgcacggcgagatcgcgagcgagggcgaccagctcggggtccccggagaatttcatgaccagcatgaaggggacgagctgcttgccgaaggaccccatccaggtgtaggtttctacatcgtaggtgacaaagagccgctccgtgcgaggatgagagccgattgggaagaactggatttcctgccaccagttggtcgagtggctgttgatgtgatgaaagtagaaatcccgccggcgaaccgagcactcgtgctgatgcttgtaaaagcgtccgcagtactcgcagcgctgcacgggctgtacctcatccacgagatacacagcgcgtcccttgaggaggaacttcaggagtggcggccctggctggtggttttcatgttcgcctgcgtgggactcaccctggggctcctcgaggacggagaggctgacgagcccgcgcgggagccaggtccagatctcggcgcggcgggggcggagagcgaaaacgagggcgcgcagttgggagctgtccatggtgtcgcggagatccaggtccgggggcagggttctgaggttgacctcgtagaggcgggtgagggcgtgcttgagatgcagatggtacttgatctccacgggtgagttggtggtcgtgtccacgcattgcatgagcccgtagctgcgcggggccacgaccgtgccgcggtgcgcttttagaagcggtgtcgcggacgcgctcccggcggcagcggcggttccggccccgcgggcagtggcggtagaggcacgtcggcgtggcgctcgggcaggtcccggtgctgcgccctgagagcgctggcgtgcgcgacgacgcggcggttgacatcctggatctgccgcctttgcgtgaagaccacgggccccgtgactttgaacctgaaagacagttcaacagaatcaatctcggcgtcattgacggcggcctgacgcaggatctcttgcacgtcgcccgagttgtcctggtaggcgatctcggacatgaactgctcgatttcctcctcctggagatcgccgcggcccgcgcgctctacggtggcggcaaggtcattcgagatgcgacccatgagctgcgagaaggcgcccaggccgctctcgttccagacgcggctgtaaaccacgtccccgtcggcgtcgcgcgcgcgcatgaccacctgcgcgaggttgagctccacgtgccgcgcgaagacggcatagttgcgcaggcgttggaagaggtagttgagggtggtggcgatgtgctcggtgacgaagaagtacataatccagcggcgcaggggcatttcgctgatgtcgccaatggcctccagcctttccatggcctcgtagaaatccacggcgaagttgaaaaactgggcgttgcgggccgagaccgtgagctcgtcttccaggagcctgatgagttcggcgatggtggcgcgcacctcgcgctcgaaatccccgggggcctcctcctcttcctcttcttccatgacgacctcttcttctatttcttcctctgggggcggtggtggtggcggggcccgacgacgacggcgacgcaccgggagacggtcgacgaagcgctcgatcatctccccgcggcggcgacgcatggtttcggtgacggcgcgaccccgttcgcgaggacgcagcgtgaagacgccgccggtcatctcccggtaatggggtgggtccccgttgggcagcgatagggcgctgacaatgcatcttatcaattgcggtgtagggcacgtgagcgcgtcgagatcgaccggatcggagaatctttcgaggaaagcgtctagccaatcgcagtcgcaaggtaagctcaaacacgtagcagccctgtggacgctgttagaattgcggttgctgatgatgtaattgaagtaggcgtttttgaggcggcggatggtggcgaggaggaccaggtccttgggtcccgcttgctggatgcggagccgctcggccatgccccaggcctggccctgacaccggctcaggttcttgtagtagtcatgcatgagcctctcgatgtcatcactggcggaggcggagtcttccatgcgggtgaccccgacgcccctgaacggctgcacgagcgccaggtcggcgacgacgcgctcggcgaggatggcctgttgcacgcgggtgagggtgtcctggaagtcgtccatgtcgacgaagcggtggtaggcccctgtgttgatggtgtaagtgcagttggccataagcgaccagttgacggtctgcaggccgggttgcacgacctcggagtacctgagccgcgagaaggcgcgcgagtcgaagacatagtcgttgcaggtgcgcacgaggtactggtatccgactagaaagtgcggcggcggctggcggtagagcggccagcgctgggtggccggcgcgcccggggccaggtcctcaagcatgagtcggtggtagccgtagaggtagcgggacatccaggtgatgccggcggcggtggtggaggcgcgcgggaactcgcggacgcggttccagatgttgcgcaggggcaggaaatagtccatggtcggcacggtctggccggtgagacgcgcgcagtcattgatgctctagaggcaaaaacgaaagcggttgagcgggctcttcctccgtagcctggcggaacgcaaacgggttaggccgcgtgtgtaccccggttcgagtcccctcgaatcaggctggagccgcgactaacgtggtattggcactcccgtctcgacccaagcccgatagccgccaggatacggcggagagccctttttgtcggccgaggggagtcgctagacttgaaagcggccgaaaaccctgccgggtagtggctcgcgcccgtagtctggagaagcatcgccagggttgagtcgcggcagaacccggttcaaggacggccgcggcgagcgggacttggtcaccccgccgatttaaagacccacagccagccgacttctccagttacgggagcgagcccccttttttctttttgccagatgcatcccgtcctgcgccaaatgcgtcccacccccccggcgaccaccgcgaccgcggccgtagcaggcgccggcgctagccagccacagccacagacagagatggacttggaagagggcgaagggctggcgagactgggggcgccgtccccggagcgacatccccgcgtgcagctgcagaaggacgtgcgcccggcgtacgtgcctgcgcagaacctgttcagggaccgcagcggggaggagcccgaggagatgcgcgactgccggtttcgggcgggcagggagctgcgcgagggcctggaccgccagcgcgtgctgcgcgacgaggatttcgagccgaacgagcagacggggatcagccccgcgcgcgcgcacgtggcggcggccaacctggtgacggcctacgagcagacggtgaagcaggagcgcaacttccaaaagagtttcaacaaccacgtgcgcaccctgatcgcgcgcgaggaggtggccctgggcctgatgcacctgtgggacctggcggaggccatcgtgcagaacccggacagcaagcctctgacggcacagctgttcctggtggtgcagcacagcagggacaacgaggcgttcagggaggcactgctgaacatcgccgagcccgagggtcgctggctgctggagctgattaacatcttgcagagcatcgtagtgcaggagcgcagcctgagcctggccgagaaggtggcggcgatcaactactcggtgctgagcctgggcaagttttacgcgcgcaagatttacaagacgccgtatgtgcccatagacaaggaggtgaagatagacagcttttacatgcgcatggcgctcaaggtgctgacgctgagcgacgacctgggcgtgtaccgcaacgaccgcatccacaaggccgtgagcacaagccggcggcgcgagctgagcgaccgcgagctgatgctgagtctgcgccgggcgctggtaggaggcgccaccggcggtgaggagtcctactttgacatgggggcggacctgcattggcagccgagccgacgcgccttggaggccgcctacggtccagaggacttggatgaggaagaggaagaggaggaggatgcacccgttgcggggtactgacgcctccgtgatgtgtttttagatgcagcaagccccggaccccgccataagggcggcgctgcaaagccagccgtccggtctagcatcggacgactgggaggccgcgatgcaacgcatcatggccctgacgacccgcaaccccgagtcctttagacaacagccgcaggccaacagactctcggccattctggaggcggtggttccttctcggaccaaccccacgcacgagaaggtgctggcgatcgtgaacgcgctggcggagaacaaggccatccgtcccgacgaggccgggctagtgtacaacgccctgctggagcgcgtgggccgctacaacagcacaaacgtgcagtccaacctggaccggctggtgacggacgtgcgcgaggccgtggcgcagcgcgagcggttcaagaacgagggcctgggttcgctggtggcgctgaacgccttcctggcgacgcagccggcgaacgtgccgcgcgggcaggatgattataccaactttataagcgcgctgcggctgatggtgaccgaggtgccccagagcgaggtgtaccagtcgggcccggactactttttccagacgagcagacagggcctgcagacggtgaacctgagtcaggctttcaagaacctgcgcgggctgtggggcgtgcaggcgcccgtgggcgaccggtcgacggtgagcagcttgctgacgcccaactcgcggctgctgctgctgctgatcgcgcccttcaccgacagtggcagcgtgaaccgcaactcgtacctgggtcacctgctgacgctgtaccgcgaggccataggccaggcgcaggtggatgagcagaccttccaggagatcactagcgtgagccgcgcgctgggtcagaacgacaccgacagtctgagggccaccctgaacttcttgctgaccaatagacagcagaagatcccggcgcagtacgcgctgtcggccgaggaggagcgcatcctgagatatgtgcagcagagcgtagggctgttcctgatgcaggagggggccacccccagcgccgcgctggacatgaccgcgcgcaacatggaacctagcatgtacgccgccaaccggccgtttattaataagctgatggactacctgcaccgcgcggcgtccatgaactcggactactttaccaatgccatcttgaacccgcactggctcccgccgccggggttctacacgggcgagtacgacatgcctgaccccaacgacgggtttttgtgggacgacgtggacagcgcggtgttctcaccgaccttgcaaaagcgccaggaggcggtgcgcacgcccgcgagcgagggcgcggtgggtcggagcccctttcctagcttagggagtttgcatagcttgccgggctcggtgaacagcggcagggtgagccggccgcgcttgctgggcgaggacgagtacctgaacgactcgctgctgcagccgccgcgggtcaagaacgccatggtcaataacgggatagagagtctggtggacaaactgaaccgctggaaaacctacgctcaggaccatagggaacctgcgcccgcgccgcggcgacagcgtcacgaccggcagcggggcctggtgtgggacgacgaggactcggccgacgatagcagcgtgttggacttgggcgggagcggtggggccaacccgttcgcgcatctgcagcccagactggggcgacggatgttttgaatgcaaaataaaactcaccaaggccatagcgtgcgttctcttccttgttagagatgaggcgcgcggtggtgtcttcctctcctcctccctcgtacgagagcgtgatggcgcaggcgaccctggaggttccgtttgtgcctccgcggtatatggctcctacggagggcagaaacagcattcgttactcggagctggctccgctgtacgacaccactcgcgtgtatttggtggacaacaagtcggcggacatcgcttccctgaactaccaaaacgaccacagcaacttcctgaccacggtggtgcagaacaacgatttcacccctgccgaggccagcacgcagacgataaattttgacgagcggtcgcggtggggcggtgatctgaagaccattctgcacaccaacatgcctaatgtgaacgagtacatgttcaccagcaagtttaaggcgcgggtgatggtggctagaaaaaaggcggaaggggctgatgcaaatgataggagcaaggatatcttagagtatcagtggtttgagtttaccctgcccgagggcaacttttccgagaccatgaccatagacctaatgaacaacgccatcttggaaaactacttgcaagtggggcggcaaaatggcgtgctggagagtgatatcggagtcaagtttgacagcagaaatttcaagctgggctgggacccggtgaccaagctggtgatgccaggggtctacacctacgaggccttccacccggacgtggtgctgctgccgggctgcggggtggatttcaccgagagccgcctgagcaacctcctgggcattcgcaagaagcaaccttttcaagagggcttcagaatcatgtatgaggacctagtagggggcaacatccccgctctcctgaatgtcaaggagtatctgaaggataaggaagaagctggcaaagcagatgcaaatactattaaggctcagaatgatgccgtcccaagaggagataactatgcatcagcggcagaagccaaagcagcaggaaaagaaattgagttgaaggccattttgaaagatgattcagacagaagctacaatgtgatcgagggaaccacagacaccctgtaccgcagttggtacctgtcctatacctacggggatcccgagaagggggtgcagtcgtggacgctgctcaccaccccggacgtcacctgcggcgcggagcaagtctactggtcgctgccggacctcatgcaagaccccgtcaccttccgctctacccagcaagtcagcaactaccccgtggtcggcgccgagctcatgcccttccgcgccaagagcttttacaacgacctcgccgtctactcccagctcatccgcagctacacctccctcacccacgtcttcaaccgcttccccgacaaccagatcctttgccgcccgcccgcgcccaccatcaccaccgtcagtgaaaacgtgcctgctctcacagatcacgggacgctaccgctgcgcagcagtatccgcggagtccagcgagtgaccgtcactgacgcccgtcgccgcacctgtccctacgtctacaaggccctgggcatagtcgcgccgcgcgtgctttccagtcgcaccttctaaaaaatgtctattctcatctcgcccagcaataacaccggctggggtcttactaggcccagcaccatgtacggaggagccaagaaacgctcccagcagcaccccgtccgcgtccgcggtcacttccgcgctccctggggcgcttacaagcgggggcggacctctgctcctgccgccgtgcgcaccaccgtcgacgacgtcatcgactcggtggtcgccgatgcgcgcaactacacccccgccccctcgaccgtggacgcggtcatcgacagcgtggtggcagacgcgcgtgactatgccagacgcaagagccggcggcgacggatcgccaggcgccaccggagcacgcccgccatgcgcgccgcccgagctctgctgcgccgcgccagacgcacgggccgccgggccatgatgcgagccgcgcgccgcgctgccactgcacccacccccgcaggcaggactcgcagacgagcggccgctgccgccgccgcggccatctctagcatgaccagacccaggcgcggaaacgtgtactgggtgcgcgactccgtcacgggcgtgcgcgtgcccgtgcgcacccgtcctcctcgtccctgatctaatgcttgtgtcctcccccgcaagcgacgatgtcaaagcgcaaaatcaaggaggagatgctccaggtcgtcgccccggagatttacggaccaccccaggcggaccagaaaccccgcaaaatcaagcgggttaaaaaaaaggatgaggtggacgagggggcagtagagtttgtgcgcgagttcgctccgcggcggcgcgtaaattggaaggggcgcagggtgcagcgtgtgttgcggcccggcacggcggtggtgttcacgcccggcgagcggtcctcggtcaggagcaagcgtagctatgacgaggtgtacggcgacgacgacatcctggaccaggcggcggagcgggcgggcgagttcgcctacgggaagcggtcgcgcgaagaggagctgatctcgctgccgctggacgaaagcaaccccacgccgagcctaaagcccgtgaccctgcagcaggtgctgccccaggcagtgctgctgccgagccgcggggtcaagcgcgagggcgagagcatgtacccgaccatgcagatcatggtgcccaagcgccggcgcgtggaggacgtgctggacaccgtaaaaatggatgtggagcccgaggtcaaggtgcgccccatcaagcaggtggcgccgggcctgggcgtgcaaaccgtggacattcagatccccaccgacatggatgtcgacaaaaaaccctcgaccagcatcgaggtgcaaaccgacccctggctcccagcctccaccgctaccgcgtccacttctaccgccgccacggctaccgagcctcccaggaggcgaagatggggcgccgccagccggctgatgcccaactacgtgttgcatccttccatcatcccgacgccaggctaccgcggcacccggtactacgccagccgcaggcgcccagccagcaaacgccgccgccgcaccgccacccgccgccgtctggcccccgcccgcgtgcgccgcgtgaccacgcggcggggccgctcgctcgttctgcccaccgtgcgctaccaccccagcatcctttaatccgtgtgctgtgatactgttgcagagagatggctctcacttgccgcctgcgcatccccgtcccgaattaccgaggaagatcccgccgcaggagaggcatggcaggcagtggcctgaaccgccgccggcggcgggccatgcgcaggcgcctgagtggcggctttctgcccgcgctcatccccataatcgccgcggccatcggcacgatcccgggcatagcttccgttgcgctgcaggcgtcgcagcgccgttgatgtgcgaataaagcctctttagactctgacacacctggtcctgtatatttttagaatggaagacatcaattttgcgtccctggctccgcggcacggcacgcggccgttcatgggcacctggaacgagatcggcaccagccagctgaacgggggcgccttcaattggagcagtgtctggagcgggcttaaaaatttcggctcgacgctccggacctatgggaacaaggcctggaatagtagcactgggcagttgttaagggaaaagctcaaagaccagaacttccagcaaaaggtggtggacgggctggcctcgggcattaacggggtggtggacatcgcgaaccaggccgtgcagcgcgagataaacagccgcctggacccgcggccgcccacggtggtggagatggaagatgcaactcttccgccgcccaagggcgagaagcgaccgcggcccgacgcggaggagacaatcctgcaagtggacgagccgccctcgtacgaggaggccgtcaaggccggcatgcccaccacgcgcatcatcgcgccgctggccacgggtgtaatgaaacccgctacccttgacctgcctccaccacccacgcccgctccaccaaaagcagctccggttgtgcagccccctccggtggcgaccgccgtgcgccgcgtccccgcccgccgccaggcccagaactggcagagcacgctgcacagtatcgtgggcctgggagtgaaaagtctgaagcgccgccgatgctattgagagagagtaaagaggacactaaagggagagcttaacttgtatgtgccttaccgccagagaacgcgcgaagatggccaccccctcgatgatgccgcagtgggcgtacatgcacatcgccgggcaggacgcctcggagtacctgagcccgggtctggtgcagtttgcccgcgccaccgacacgtacttcagcctgggcaacaagtttaggaaccccacggtggctcccacccacgatgtgaccacggaccggtcccagcgtctgacgctgcgctttgtgcccgtggatcgcgaggacaccacgtactcgtacaaggcgcgcttcactctggccgtgggcgacaaccgggtgctagacatggccagcacttactttgacatccgcggcgtcctggaccgcggcccaagcttcaaaccctactcgggcacggcttacaacagcctggcccccaagggcgcccccaatcccagtcagtggactaccaaagaaaagcaaaacggaggaactggagcagaaaaagatgttacaaagacatttggacttgccgccatgggaggcagtaatatttctaaagacggtttgcagattggaactgacaaaacagcaaatgctgaaaaaccaatctatgcagacaaaactttccagccagaacctcaagttggagaagaaaactggcaggataatgatgaatattatggcggcagggctcttaaaaaagataccaaaatgaagccatgctatggttcatttgctaaacccacaaacaaggaaggtgggcaggctaaattgaaagaaacacccaatggtaccgatcctcaatacgatgtggacatggctttctttgactcaagcactataaatataccagatgtggtgttgtacactgaaaatgtagatttggaaactccagatacacatgtggtgtacaaaccaggcaaagaggatgacagttctgaagctaatttaactcagcagtccatgcctaacagaccaaactacattggcttcagagacaactttgtggggctattgtactacaacagcactggcaacatgggtgtgctggctggtcaggcttctcagttgaatgccgtggtcgacttgcaagacagaaacaccgaactgtcttaccagctcttgctagattctcttggtgacagaaccagatattttagtatgtggaactctgcggtggacagctatgatcccgatgtcaggatcattgagaaccacggtgtggaagatgaacttcctaactattgcttccccttggacggtgttcaaactaattcagcctatcaaggtgttaaactaaagcctgatcaaacaggaggcggagttaatggagattgggtaaaggatgatgacatttcagcccataatcaaattggaaagggcaacatctttgccatggagatcaacctccaggccaacctgtggaagagttttctgtactcgaacgtggccctgtacctgcccgactcctacaagtacacgccggccaacgtcacgctgcccgccaacaccaacacctatgagtacatgaacggccgcgtggtagccccctcgctggtggacgcctacattaacatcggcgcccgctggtcgctggaccccatggacaacgtcaacccctttaaccaccaccgcaatgcgggcctgcgctaccgctccatgcttttgggcaatggccgctacgtgcccttccacatccaagtgccccaaaagttctttgccatcaagaacctgctcctgctccccggctcctacacctacgagtggaacttccgcaaggatgtcaacatgatcctgcagagttccctcggaaacgacctgcgcgtcgacggcgcctccgtccgcttcgacagcgtcaacctctacgccaccttcttccccatggcgcacaacaccgcctccaccctggaagccatgctgcgcaacgacaccaacgaccagtccttcaacgactacctctcggccgccaacatgctctaccccatcccggccaaggccaccaacgtgcccatttccatcccctcgcgcaactgggccgccttccgcggctggagtttcacccggctcaagaccaaggaaactccctcccttggctcgggttttgacccctactttgtctactcgggctccatcccctacctcgacgggaccttctacctcaaccacaccttcaagaaggtttccatcatgttcgactcctcggtcagctggcccggcaacgaccggctgcttacgccgaacgagttcgagatcaagcgcagcgtcgacggggagggctacaacgtggcccaatgcaacatgaccaaggactggttcctcgtccagatgctctcccactacaacatcggctaccagggcttccatgtgcccgagggctacaaggaccgcatgtactccttcttccgcaacttccagcccatgagcaggcaggtggtcgatgagatcaactacaaggactacaaggcagtcaccctgcccttccagcacaacaactctggcttcaccggctacctggcacccaccatgcgtcaggggcagccctaccccgccaacttcccctacccgctcatcggctccaccgcagtgccatccgtcacccagaaaaagttcctctgcgacagggtcatgtggcgcatccccttctccagcaacttcatgtccatgggcgccctcaccgacctgggtcagaacatgctctacgccaactcggcccacgcgctcgacatgaccttcgaggtggaccccatggatgagcccaccctcctctatcttctcttcgaagttttcgacgtggtcagagtgcaccagccgcaccgcggcgtcatcgaggccgtctacctgcgcacgcccttctccgccggcaacgccaccacctaagcatgagcggctccagcgaacgagagctcgcggccatcgtgcgcgacctgggctgcgggccctactttttgggcacccacgacaagcgcttcccgggcttcctcgccggcgacaagctggcctgcgccatcgtcaacacggccggccgcgagaccgggggcgtgcactggctcgcctttggctggaacccgcgctcgcgcacctgctacatgttcgaccccttcgggttctcggaccgccggctcaagcagatttacagcttcgagtacgaggccatgctgcgccgaagcgccctggcctcctcgcccgatcgctgtcttagcctcgaacagtccacccagaccgtgcaggggcccgactccgccgcctgcggactcttctgttgcatgttcttgcatgccttcgtgcactggcccgaccgacccatggacgggaaccccaccatgaacttgctgacgggggtgcccaacggcatgctacaatcgccacaggtgctgcccaccctcaggcgcaaccaggaggagctctaccgcttcctcgcgcgccactccccctactttcgctcccaccgcgccgccatcgaacacgccaccgcttttgataaaatgaaacaactgcgtgtatgactcaaataaacagcacttttattttacacatgcgctggagtatatgcaagttatttaaaagtcgaaggggttctcgcgctcgtcgttgtgcgccgcgctggggagggccacgttgcggtactggaacttgggctgccacttgaactcggggatcaccagtttgggcactggagtctcggggaaggtctcgctccacatgcgccggctcatttgcagggcgcccagcatgtcagggccggagatcttgaaatcgcagttgggaccggtgctctgcgcgcgcgagttgcggtacacggggttgcagcactggaacaccatcagactggggtacttcacactggcaagcacgctcttgtcgctaatctgatccttgtccaggtcctcggcgttgctcaggccgaacggggtcatcttgcacagctggcggcccaggaagggcacgctctgaggcttgtggttacactcgcagtgcacgggcatcagcatcatccccgcgccgcgctgcatattcgggtagagggccttgacgaaggccgcgatctgcttgaaagcttgctgggccttggccccctcgctaaaaaacaggccgcagctcttcccgctgaactggttattcccgcacccggcatcatgcacgcagcagcgcgcgtcatggctggtcagttgcaccacgctccgtccccagcggttctgggtcaccttagccttgctgggctgctccttcagcgcgcgctgtccgttctcgctggtcacatccatctccaccacgtggtccttgtgaatcatcaccgttccatgcagacacttgagctgaccttccacctcggtgcagccgtgatcccacaggacgcagccggtgcactcccaattcttgtgcgcgatcccgctgtggctgaaaatgtaaccttgcaacaggcgacccataatggtgctaaatgctttctgggtggtgaatgtcagttgcatcccgcgggcctcctcgttcatccaggtctggcacatcttctggaagatctcggtctgctccggcatgagcttgtaagcatcgcgcaagccgctgtcgacgcggtagcgttccatcagcacgttcatggtatccatgcccttctcccatgacgagaccagaggcagactcagggggttgcgcacgttcaggacaccaggggtcgcgggctcgacgatgcgttttccgtccttgccttccttcaacagaaccggaggctggctgaatcccactcccacgatcacggcgtcttcctggggcatctcttcgtcggggtctaccttggtcacatgcttggtctttctggcttgcttcttttttggagggctgtccacggggaccacgtcctcctcggaagacccggagcccacccgctgatactttcggcgcttggtgggcagaggaggtggcggcggcgaggggctcctctcctgctccggcggatagcgcgccgacccgtggccccggggcggagtggcctctcgctccatgaaccggcgcacgtcctgactgccgccggccattgtttcctaggggaagatggaggagcagccgcgtaagcaggagcaggaggaggacttaaccacccacgagcaacccaaaatcgagcaggacctgggcttcgaagagccggctcgtctaaaacccccacaggatgaacaggagcacgagcaagacgcaggccaggaggagaccgacgctgggctcgagcatggctacctgggaggagaggaggatgtgctgctaaaacacctgcagcgccagtccctcatcctccgggacgccctggccgaccggagcgaaacccccctcagcgtcgaggagctgtgtcgggcctacgagctcaacctcttctcgccgcgcgtgccccccaaacgccagcccaacggcacctgcgagcccaacccgcgtctcaacttctatcccgtctttgcggtccccgaggcccttgccacctatcacatctttttcaagaaccaaaagatccccatctcctgtcgcgccaatcgcactcgcgccgacgcgctcctcgctctggggcccggcgcgcgcatacctgatatcgcttccctggaagaggtgcccaagatcttcgaagggctcggtcgggacgagacgcgcgcggcaaacgctctgaaagaaacagcagaggaagagggttacactagcgccctggtagagttggaaggcgacaacgccaggctggccgtgcttaagcgcagcgtcgagctcacccatttcgcctaccccgccgtcaacctcccgcccaaggtcatgcgtcgcatcatggatcagctcatcatgccccacatcgaggcccttgatgaaagtcaggaacagcgccccgagaacgcccagcccgtggtcagcgacgagatgctcgcgcgctggctcgggacccgcgacccccaggccctggagcagcggcgcaagctcatgctggccgtggtcctggtcacccttgagctcgaatgcatgcgccgcttttttaccgaccccgagaccctgcgcaaggtcgaggagaccctgcactacactttcagacacggtttcgtcaggcaggcctgcaagatctccaacgtggagctgaccaacctggtctcctgcctggggatcctacacgagaaccgcttgggacagaccgtgctccactctaccctgaagggcgaggcgcggcgggactacatccgcgactgcgtctttctctttctctgccacacatggcaagcggccatgggcgtgtggcagcagtgtctcgaggacgagaacctgaaggagctggacaagcttcttgctagaaaccttaaaaagctgtggacgggcttcgacgagcgcaccgtcgcctcggacctggccgagatcgtcttccccgagcgcctgaggcagacgctgaaaggagggctgcccgacttcatgagccagagcatgttgcaaaactaccgcactttcattctcgagcgatctgggatgctgcccgccacctgcaacgccttcccctccgactttgtcccgctgagctaccgcgagtgtcccccgccgctgtggagccactgctacctcttgcagctggccaactacattgcccaccactcggatgtgatcgaggacgtgagcggcgaggggctgctcgagtgccactgtcgctgcaacctatgctccccgcaccgctccctggtctgcaacccccagctactgagcgagacccaggtcatcggtacctttgagctgcaaggtccgcaggagtccaccgctccgctgaaactcacgccggggttgtggacttccgcgtacctgcgcaaatttgtacccgaggactactacgcccatgagataaagttcttcgaggaccaatcgcgtccgcagcacgcggatctcacggcctgcgtcatcacccagggcgcgatcctcgcccaattgcacgccatccaaaaatcccgccaagagtttcttctgaaaaagggtagaggggtctacctggacccccagacgggcgaggtgctcaacccgggtctcccccagcatgccgaggaagaagcaggagccgctagtggaggagatggaagaagaatgggacagccaggcagaggaggacgaatgggaggaggagacagaggaggaagacttggaagaggtggaagaggagcaggcaacagagcagcccgtcgccgcaccatccgcgccggcagcccctccggtcacggatacaacctccgcagctccggccaagcctcctcgtagatgggatcgagtgaagggtgacggtaagcacgagcgacagggctaccgatcatggagggcccacaaagccgcgatcatcgcctgcttgcaagactgcggggggaacatcgctttcgcccgccgctacctgctcttccaccgcggggtgaacatcccccgcaacgtgttgcattactaccgtcaccttcacagctaagaaaaagcaagtcaaaggagtcgccggaggaggaggcctgaggatcgcggcgaacgagcccttgaccaccagggagctgaggaaccggatcttccccactctttatgccatttttcagcaaagtcgaggtcagcagcaagagctcaaagtaaaaaaccggtctctgcgctcgctcacccgcagttgcttgtaccacaaaaacgaagatcagctgcagcgcactctcgaagacgccgaggctctgttccacaagtactgcgcgctgactcttaaagactaaggcgcgcccacccggaaaaaaggcgggaattacctcatcgccaccatgagcaaggagattcccaccccttacatgtggagctatcagccccagatgggcctggccgcgggcgcctcccaggactactccacccgcatgaactggcttagtgccggcccctcgatgatctcacgggtcaacggggtccgtaaccatcgaaaccagatattgttgcagcaggcggcggtcacctccacgcccagggcaaagctcaacccgcgtaattggccctccaccctggtgtatcaggaaatccccgggccgactaccgtactacttccgcgtgacgcactggccgaagtccgcatgactaactcaggtgtccagctggccggcggcgcttcccggtgcccgctccgcccacaatcgggtataaaaaccctggtgatccgaggcagaggcacacagctcaacgacgagttggtgagctcttcaatcggtctgcgaccggacggagtgttccaactagccggagccgggagatcgtccttcactcccaaccaggcctacctgaccttgcagagcagctcttcggagcctcgctcgggaggcatcggaaccctccagttcgtggaggagtttgtgccctcggtctacttcaaccccttctcgggctcgccaggcctctacccggacgagtttataccgaacttcgacgcagtgagagaagcggtggacggctacgactgaatgtcctatggtgactcggctgagctcgctcggttgaggcatctggaccactgccgccgcctgcgctgctttgcccgggagagctacggcctcatctactttgagctgcccgaggagcaccccaacggccctgcacacggagtgcggatcaccgtagagggcaccaccgagtctcacctggtcaggttcttcacccagcaacccttcctggtcgagcgggaccggggcgccaccacctacaccgtctactgcatttgtcctaccccgaagttgcatgagaatttttgttgtactctttgtggtgagtttaataaaagctaaactcttgcaatactctggaccttgtcgtcatcaactcaacgagaccgtctacctcaccaaccagactgaggtaaaacttacctgcagaccacacaagacctatatcatctggttcttcgagaacacctcatttgcagtctccaacactcactgcaacgacggtgttgaacttcccaacaacctttccagtggactgagttacaatacacgtagagctaagctcatcctctacaatccttttgtagagggaacctaccagtgccagagcggaccttgcttccacagttttactttggtgaacgttaccggcagcagcacagccgctccagaaactaaccttccttctgatactatcaaaccttgtttcggaggtgagctaaggcttcccccttctcaggagggggttagcccatacgaagtggtcgggtatttgattttaggggtggtcctgggtgggtgcatagcggtgctagctcagctgccttgctgggtggaaatcaaaatctttatatgctgggtaagacattgtggggaggaactatgaaggggctcttgctgattatcctttccctggtggggggtgtgctgtcatgccacgaacagccacgatgtaacatcaccacaggcaatgagaggaacgactgctctgtagttatcaaatgcgagcaccattgtcctctcaacattacattcaaaaataagaccatgggaaatgtatgggtgggattctggcaaccaggagatgagcagaactacacggtcactgtccatggtagcaatggcaatcacactttcggtttcaaattcatttttgaagtcatgtgtgatatcacactacatgtggctagacttcatggcttgtggccccctaccaaggataacatggtgggtttttctttggcttttgtgatcatggcctgcttgatgtcaggtctgctggtaggggctctagtgtggtttctgaaacgcaagcccaggtatggaaatgaagagaaggaaaaattgctataaattctttttctttttcgcagaaccatgaatacagtgatccgtatcgtgctgctctctcttcttgtagcttttagtcaggcaggatttcatactatcaatgctacatggtgggctaatataactttagtgggacccccagacacaccagtcacttggtatgatactcaaggattgtggttttgcaatggcagtagagttaagaatcctcaaatcagacatacatgtaatgatcaaaaccttactttgatccatgtgaacaaaacttatgaaagaacatacatgggttataatagacaagggactaaaaaagaagactacaaagttgtagttataccacctcctcctgctactgtaaaaccacagccagagccagagtatgtgtttgtttatatgggagagaacaaaactctagaaggtcctccgggaactccagtcacatggtttaatcaggatggaaagaaattttgtgaaggagaaaaagttcttcatccagaatttaaccacacctgtgacaaacaaaaccttatactactgtttgtgaattttacacatgatggagcttaccttgggtacaatcatcaaggaacccagagaacacactatgaagttacagtattagatctttttccagattctggccaaatgaaaattgaaaatcatagtgaggaaacagagcaaaaaaatgatgaacatcataactggcagaaacagggtgggcaaaaacagggtgggcaaaaaacaaatcaaacaaaagttaatgacaggagaaaaacagcgcaaaaaagaccatcaaagctaaagccggcaactattgaggcaatgctggttacagtgactgccgggtctaacttaactttggttggacctaaagcagaaggaaaagttacttggtttgatggagatttaaaaagaccatgtgagcctaattacagactaagacacgaatgtaataatcaaaacttaactctgattaatgtaactaaagattatgagggaacttactatggtacaaatgacaaagatgagggcaaaaggtacagagtgaaagtaaatactacaaattctcaatctgtgaaaattcagccatataccagacaaactactcctgatcaagagcacaaatttgaattacagttcgaaactaatggaaattatgattcaaaaattccctcaaccactgtggcaatcgtggtgggtgtgattgcgggcttcataactctgatcattgtcttcatatgctacatctgctgccgcaagcgtcccagggcatacaatcatatggtagacccactactcagcttctcttactaagactcagtcactttcatttcagaaccatgaaggctttcacagcttgcgttctgattagcctagtcacacttagtgtagctattaaaaatcaatatcatgttcataatgttaccagagatggatatatcacattaaatgtaacaattgataatactacctggacaagatatcatttaaataagtggcatcaaatttgtacgtggtcagacccatcatacaaatgtcacagcaatggcagcattaccattcatgctttcaatattacttctggccagtacaaagctgaaagttttactaactggtttagatattacggtaatcataaacatgaaattcatatttttaacataactgtaattgagcatcctacaacaaaagcacccaccactgctaatacagctacatcaattaaatcaacaaccacacagcctactactagggagacaactcaacctaccaccacagtcagtacaactactgagaccactactcaaactacacagctagacacaacagtgcagaatagcactgtgttggttaggtatctgttgagggaggaaagtactactgaacagacagaggctacctcaagtgcctttagcagcactgcaaatttaacttcgcttgcttggactaatgaaaccggagtatcattgatgaatcatcagcctttctcaggtttggatattcaaattacttttctggttgtttgtgggatctttattcttgtggttcttctgtactttgtctgctgcaaagccagagagaaatctaggaggcccatctacaggccagtaatcggggaacctcagccactccaagtggaagggggtctaaggaatcttcttttctctttttcagtatggtgatcagccatgattcctaggttcttcctatttaacatcctcttctgtctcttcaacatctgcgctgcctttgcagccgtctcgcacgcctcgcccgactgtctcgggcccttcccaacctacctcctctttgccctgctcacctgcacctgcgtctgcagcattgtctgcctggtcatcaccttcctgcagcttatcgactggtgctgtgcgcgctacaattatctccatcacagtcccgaatacagggacaagaacgtagccagaatcttaaggctcatctgaccatgcagactctgctcatgctgctatccctcctatcccctgccctagccacttatgctgattactctaaatgcaaattcgcagacatatggaatttcttagattgctatcaggaaaaaattgatatgccctcctattacttggtgattgtgggaatagtcatggtctgctcctgcactttctttgccatcatgatttacccctgttttgatctcggctggaactctgttgaagcattcacatacacactagaaagcagttcactagcctccacgccaccacccacaccgcctcctcgcagaaatcagttccccctgatacagtacttagaagagccccctccccgacccccttccactgttagctactttcacataaccggcggcgatgactgaccaccacctggacctcgagatggacggccaggcctccgagcagcgcatcctgcaactgcgcgtccgtcagcagcaggagcgggccgccaaggagctccttgatgccatcaacatccaccagtgcaagaagggcatcttctgcctggtcaaacaggcaaagatcacctacgagctcgtgtccaacggcaaacagcatcgccttacctatgagatgccccagcagaagcagaagttcacctgcatggtgggcgtcaaccccatagtcatcacccagcagtcgggcgagaccaacggctgcatccactgctcctgcgaaagccccgagtgcatctactcccttctcaagaccctttgcggactccgcgacctcctccccatgaactgatgttgattaaaagcccagaaaccaatcagacccttcctcatttccccatcccaatactcataagaataaatcattggaattaatcattcaataaagatcacttacttgaaatctgaaagtatgtctctggtgtagttgctcagcaacacctcggtaccctcctcccagctctggtactccagtccccggcgggcggcgaacttcctccacaccttgaaagggatgtcaaattcctggtccacaattttcattgtcttccctcttagatgtcaaagaggctccgggtggaagatgacttcaaccccgtctacccctatggctacgcgcggaatcagaatatccccttcctcactcccccctttgtctcctccgatggattcaaaaacttcccccctggggtactgtcactcaaactggctgatccaatcaccattaccaatggggatgtatccctcaaggtgggaggtggtctcactttgcaagatggaagcctaactgtaaaccctaaggctccactgcaagttaatactgataaaaaacttgagcttgcatatgataatccatttgaaagtagtgctaataaacttagtttaaaagtaggacatggattaaaagtattagatgaaaaaagtgctgcggggttaaaagatttaattggcaaacttgtggttttaacaggaaaaggaataggcactgaaaatttagaaaatacagatggtagcagcagaggaattggtataaatgtaagagcaagagaagggttgacatttgacaatgatggatacttggtagcatggaacccaaagtatgacacgcgcacactttggacaacaccagacacatctccaaactgcacaattgctcaagataaggactctaaactcactttggtacttacaaagtgtggaagtcaaatattagctaatgtgtctttgattgtggtcgcaggaaagtaccacatcataaataataagacaaatccaaaaataaaaagttttactattaaactgctatttaataagaacggagtgcttttagacaactcaaatcttggaaaagcttattggaactttagaagtggaaattccaatgtttcgacagcttatgaaaaagcaattggttttatgcctaatttggtagcgtatccaaaacccagtaattctaaaaaatatgcaagagacatagtttatggaactatatatcttggtggaaaacctgatcagccagcagtcattaaaactacctttaaccaagaaactggatgtgaatactctatcacatttaactttagttggtccaaaacctatgaaaatgttgaatttgaaaccacctcttttaccttctcctatattgcccaagaatgaaagaccaataaacgtgtttttcatttgaaattttcatgtatctttattgatttttacaccagcacgagtagacagtctcccaccaccagcccattttacagtgtacacggttctctcagcacgggtagccttaaatagggaaatattctcattagtgcgggaattggacttggggtctataatccacacagtttcctggcgagccaaacgggggtcggtgattgaaataaagccgtcctctgaaaagtcatccaagcgggcctcacagtccaaggtcacagtctggtggaacgagaagaacgcacagattcatactcggaaaacaggatgggtctgtgcctctccatcagcgccctcagcagtctctgccgccggggctcggtgcggctgctgcaaatgggatcgggatcacaagtctctctgactatgatcccaacagccttcagcatcagtctcctggtgcgacgggcacagcaccgcatcctgatctctgccatgttctcacagtaagtgcagcacataatcaccatgttattcagcagcccataattcagggcgctccagccaaagctcatgttgggaatgatggaacccacgtgaccatcgtaccagatgcgacagtatatcaggtgcctgcccctcatgaacacactgcccatgtacatgatctctttgggcatgtttctgtttacaatctggcggtaccaggggaagcgctggttgaacatgcacccgtaaatgactctcctgaaccacacggccagcagggtgcctcccgcccgacactgcagggagccaggggatgaacagtggcaatgcaggatccagcgctcgtacccgctcaccatttgagctcttaccaagtccagggtagcggggcacaggcacactgacatacatctttttaaaatttttatttcctctgtggtgaggatcatatcccaggggactggaaactcttggagcagggtaaagccagcagcacatggtaatccacggacagaacttacattatgataatctgcatgatcacaatcgggcaacaggggatgttgttcagtcagtgaagccctggtttcctcatcagatcgtggtaaacgggccctgcgatatggatgatggcggagcgagctggattgaatctcggtttgcattgtagtggattctcttgcgtaccttgtcgtacttctgccagcagaaatgggcccttgaacagcatatacccctcctacggccgtcctttcgctgctgccgctcagtcatccaactaaagtacatccattctcgaagattctggagaagttcctctgcatctgataaaataaaaaacccgtccatgcgaattcccctcatcacatcagccaggactctgtaggccatccccatccagttaatgctgccttgtctatcattcagagggggcggtggcaggactggaagaaccatttttattccaaacggtctcgaaggacgataaagtgcaagtcacgcaggtgacagcgttcccctccgctgtgctggtggaaacagacagccaggtcaaaacccactctattttcaaggtgctcgaccgtggcttcgagcagtggctctacgcgcacatccagcataagaatcacattaaaggctggccctccatcgatttcatcaatcatcaggttacattcctgcaccatccccaggtaattctcatttttccagccttggattatctctacaaattgttggtgtaagtccactccgcacatgtggaaaagctcccacagtgccccctccactttcataatcaggcagaccttcataatagaaacagatcctgctgctccaccacctgcagcgtgttcaaaacaacaagattcaataaggttctgccctccgccctgagctcgcgcctcaatgtcagctgcaaaaagtcacttaagtcctgggccactacagctgacaattcagagccagggctaagcgtgggactggcaagcgtaagggaaaactttaatgctccaaagctagcacccaaaaactgcatgctggaataagctctctttgtgtctccggtgatgccttccaaaatgtgagtgataaagcgtggtagtttttctttaatcatttgcgtaatagaaaagtcctctaaataagtcactaggaccccagggaccacaatgtggtagcttacaccgcgtcgctgaagcatggttagtagagatgagagtctgaaaaacagaaagcatgcactaaactaaggtggctattttcactgaaggaaaaatcactctctccagcagcagggtacccactgggtggcccttgcggacatacaaaaatcggtccgtgtgattaaaaagcagcacagtaagttcctgtcttcttccggcaaaaatcacatcagactgggttagtatgtccctggcatggtagtcattcaaggccataaatctgccctgatatccagtaggaaccagcacactcacttttaggtgaagcaataccaccccatgcggaggaatgtggaaagattcagggcaaaaaaattatatctattgctagccccttcctggacgggagcaatccctccaggactatctataaaagcatacagagattcagccatagcttagcccgcttaccagtagacagaaagcacagcagtacaagcgccaacagcagcaactgactacccactgacccagctccctatttaaaggcaccttacactgacgtaatgaccaaaggtctaaaaaccccgccaaaaaaaacacacacgccctgggtgtttttcacaaaaacacttccgcgttctcacttcctcgtatcgattttgtgactcaacttccgggttcccacgttacgtcacttctgcccttacatgtaacttggccgtatggcgccatcttgcccacgtccaaaatggctttcatgaccggccacgcctccgcgccggccgttagccgtgcgtcgtgacgttatttgcatcaccgcttctcgtccaatcagcgttggctccgccccaaaaccgttaaaattcaaaagctcatttgcatattaacttttgtttactttgtggggtatattatgatgatg

SEQ ID NO: 153 - DNA, 35385 bp, Unknown
  Description of Unknown: Human adenovirus 50 sequence
caatcaatataatataccttatagatggaatggtgccaatatgtaaatgaggtaatttaaaaaagtgcgcgctgtgtggtgattggctgcggggtgaacggctaaaaggggcggacatgctgggaggtgacgtgacttatgggggaggagttatgttgcaagttatcgcggtaaaggtgacgtaaaacgaggtgtggtttggacacggaagtagacagttttcccacgcttactgacaggatatgaggtagttttgggcggatgcaagtgaaaattctccattttcgcgcgaaaactgaatgaggaagtgaatttctgagtcatttcgcggttatgacagggtggagtatttgccgagggccgagtagactttgaccgtttacgtggaggtttcgattaccgtgtttttcacctaaatttccgcgtacggtgtcaaagtcctgtgtttttacgtaggtgtcagctgatcgctagggtatttaaacctgtcgagttccgtcaagaggccactcttgagtgccagcgagaagagttttctcctccgcgccgcgagtcagttttgcgctttgaaaatgagacacctgcgattcctgccacaggagattatctccagcgagaccgggatagaaatactggagtttgtggtaaataccctgatgggagatgacccggaaccgccagcgcagcctttcgatccacctacgctgcacgatctgtatgatttagaggtagacgggccggacgatcccaatgaggaagctgtaaatgggttttttactgattctatgctactagctgccgatgaaggattggacataaaccctcctcctgagacccttgataccccaggggtggttgtggaaagcggcagaggtgggataaaattgcctgatctgggagcagctgaaatggacttgcgttgttatgaagagggttttcctccgagtgatgatgaagatggggaaactgaacagtccatccataccgcagtgaatgagggagtaaaagctgccagcgatgtttttaagttggactgtccggagctgcctggacatggctgtaagtcttgtgaatttcacaggaataacactggaatgaaagaactattgtgctcgctttgctatatgagaatgcactgccattttatttacagtaagtgtatttaagtgaaatttaaaggaatagtgtagctgtttaataactgttgaatggtagatttatgtttttacttgtgattttttgtaggtcctgtgtctgatgatgagtcgccttctcctgattcaactacctcacctcctgaaattcaggcgcccgtacctgcaaacgtatgcaagcccattcctgtgaagcctaagtctgggaaacgccctgctgtggataagcttgaggacttgttggagggtggggatggacctttggaccttagtacccggaaactgccaaggcaatgagtgccctgcagctgtgtttatttaatgtgacgtcatgtaataaaattatgtcagctgctgagtgttttattgcttcttgggtggggacttggatatataagtaggagcagatctgtgtggttagcttatagcaacctgctgccatccatggaggtttgggctatcttggaagacctgagacagactaggctactgctagaaaacgcctcggacggagtctctggcttttggagattctggttcggtggtgatctagctaggctagtgtttaggataaaacaggactacagggaagaatttgaaaagttattggacgacagtccaggactttttgaagctcttaacttgggccatcaggctcattttaaggagaaggttttatcagttttagatttttctactcctggtagaactgctgctgctgtagcttttcttacttttatattggataaatggatccgacaaacccacttcagcaagggatacgttttggatttcatagcagcagctttgtggagaacatggaaggctcgcagcatgaggacaatcttagattactggccagtgcagcctctgggagtagcagggatactgagacacccaccgaccatgccagcggttctggaggaggagcagcaggaggacaatccgagagccggcctggaccctccggtggaggagtagctgacctgtttcctgaactgcgacgggtgcttactaggtctacgtccagtggacaggacaggggcattaagagggaaaggaatcctagtgggaataattcaagaaccgagttggctttaagtttaatgagccgtaggcgtcctgaaactgtttggtggcatgaggttcagagcgaaggcagggatgaagtttcaatattgcaggagaaatattcactagaacaacttaagacctgttggttggaacctgaggatgattgggaggtggccattaggaattatgctaagatatctctgaggcctgataaacagtatagaattactaaaaagattaatattagaaatgcatgctacatatcagggaatggggcagaggttataatagatacccaagataaagcagcttttagatgttgtatgatgggtatgtggccaggggttgtcggcatggaagcagtaacatttatgaatattaggtttaaaggggatgggtataatggcattgtatttatggctaacactaagctgattctacatggttgtagcttttttgggtttaataatacttgtgtagaagcttgggggcaagttggtgtgaggggttgtagtttttatgcatgctggattgcaacatcaggtagggtcaagagtcagttgtctgtgaagaaatgcatgtttgagagatgtaatcttggcatactgaatgaaggtgaagcaagggtccgccactgcgcagctacagaaactggctgcttcattctaataaagggaaatgccagtgtgaagcataatatgatctgtggacattcgaatgagaggccttatcagatgctgacttgcgctggtggacattgcaatattcttgctaccgtgcatatcgtttcccatgcacgcaagaaatggcctgtatttgaacataatgtgattaccaagtgcaccatgcacataggtggtcgcaggggaatgtttatgccttaccagtgtaacatgaatcatgtgaaggtgatgttggaaccagatgccttttccagagtgagcttaacaggaatctttgatatgaatattcaactatggaagatactgagatatgatgacactaaaccgagggtgcgcgcatgcgaatgcggaggcaagcatgctagattccagccggtgtgcgtggatgtgactgaagacctgagacccgatcatttggtgcttgcctgcactggagcggagttcggttctagtggtgaagaaactgactaaagtgagtagtggggcaagatgtggatggagactttcaggttggtaaggtggacagattgggtaaattttgttaatttctgtcttgcagctgccatgagtggaagcgcttcttttgaggggggagtatttagcccttatctgacgggcaggctcccatcatgggcaggagttcgtcagaatgtcatgggatccactgtggatgggagacccgtccagcccgccaattcctcaacgctgacctatgccactttgagttcgtcaccattggatgcagctgcagccgccgccgctactgctgccgccaacaccatccttggaatgggctattacggaagcatcgttgccaattccagttcctctaataacccttcaaccctggctgaggacaagctacttgttctcttggctcagctcgaggccttaacccaacgcttaggcgaactgtctaagcaggtggcccagttgcgtgagcaaactgagtctgctgttgccacagcaaagtctaaataaagatctcaaatcaataaataaagaaatacttgttataaaaacaaatgaatgtttatttggtttttcgcgcgcggtatgccctggaccatcggtctcgatcattgagaactcggtggatcttttccagtaccctgtaaaggtgggattgaatgtttagatacatgggcattagtccgtctcgggggtggagatagctccattgaagagcctcttgctccggggtagtgttataaatcacccagtcatagcaaggtcggagtgcatggtgttgcacaatatcttttaggagcagactaattgcaacggggaggcccttagtgtaggtgtttacaaatctgttgagctgggacgggtgcatcctgggggaaattatatgcattttggactggatcttgaggttggcaatgttgccgcctagatcccgtctcgggttcatattgtgcagaaccaccaagacagtgtatccggtgcacttgggaaatttatcatgcagcttagagggaaaagcatgaaaaaatttggagacgcctttgtgaccccccagattctccatgcactcatccataatgatagcgatggggccgtgggcagcggcacgggcgaacacgttccgggggtctgaaacatcatagttatgctcctgagtcaggtcatcataagccattttaataaactttgggcggagggtgccagattgggggatgaaagttccctctggcccgggagcatagtttccctcacatatttgcatttcccaggctttcagttccgagggggggatcatgtccacctgcggggctataaaaaataccgtttctggagccggggtgattaactgggatgagagcaaattcctaagcagctgagacttgccgcacccagtgggaccgtaaatgaccccaattacgggttgcagatggtagtttagggagcgacagctgccgtcctcccggagcaggggggccacttcgttcatcatttcccttacatggatattttcccgcaccaagtccgttaggaggcgctctcccccaagggatagaagctcctggagcgaggagaagtttttcaacggtttcagcccgtcagccatgggcattttggaaagagtctgttgcaagagctcgagccggtcccagagctcggtgatgtgctctatggcatctcgatccagcagacctcctcgtttcgcgggttgggacggctcctggagtagggaatcagacgatgagcgtccagcgctgctagggtccgatccttccatggtcgcagcgtccgagtcagggttgtttccgtcacggtgaaggggtgcgcgcctggttgggcgcttgcgagggtgcgcttcagactcatcctgctggtcgagaaccgctgccgatcggcgccctgcatgtcggccaggtagcagtttaccatgagttcgtagttgagcgcctcggccgcgtggcctttggcacggagcttacctttggaagttttatggcaggcggggcagtagatacatttgagggcatacagcttgggcgcgaggaaaatggattcgggggagtatgcatccgcaccgcaggaggcgcagacggtttcgcactccacgagccaggtcagatccggctcatcggggtcaaaaacaagttttccgccatgttttttgatgcgtttcttacctttggtttccatgagttcgtgtccccgctgggtgacaaagaggctgtccgtgtccccgtagaccgactttatgggcctgtcctcgagcggagtgcctcggtcctcttcgtagaggaacccagcccactctgatacaaaagcgcgtgtccaggccagcacaaaggaggccacgtgggaggggtagcggtcgttgtcaaccagggggtccaccttctctacggtatgtaaacacatgtccccctcctccacatccaagaatgtgattggcttgtaagtgtaggccacgtgaccaggggtccccgccgggggggtataaaagtgggcgggcctctgttcgtcctcactgtcttccggatcactgtccaggagcgccagctgttggggtaggtattctctctcgaaggcgggcatgacctctgcactcaggttgtcagtttctaggaacgaggaggatttgatattgacagtaccagcagagatgcctttcataagactctcgtccatctggtcagaaaacacaatcttcttgttatccagcttggtggcaaatgatccatagagggcattggatagaagcttggcgatggagcgcatggtttggttcttttccttgtccgcgcgctccttggcggcgatgttaagctggacgtactcgcgcgccacacatttccattcagggaagatggttgtcagttcatccggaactattctgactcgccatcccctattgtgcagggttatcagatccacactggtggctacctcgcctcggaggggctcattggtccagcagagtcgacctccttttcttgaacagaaaggggggagggggtctagcatgaactcatcaggggggtccgcatctatggtaaatattcccggtagcaaatctttgtcaaaatagctgatggtggcgggatcatccaaggtcatctgccattctcgaactgccagcgcgcgctcgtaggggttaagaggggtgccccagggcatggggtgggtgagcgcggaggcatacatgccacagatatcgtagacatagaggggctcttcgaggatgccgatgtaagtgggataacagcgcccccctctgatgcttgctcgcacatagtcatagagttcatgtgagggggcgagaagacccgggcccagattggtgcggttgggtttttccgccctgtaaacgatctggcgaaagatggcatgggaattggaagagatagtaggtctctggaatatgttaaaatgggcatgaggtaggcctacagagtcccttatgaagtgggcatatgactcttgcagcttggctaccagctcggcggtgacgagtacgtccagggcacagtagtcgagagtttcctggatgatgtcataacgcggttggcttttcttttcccacagctcgcggttgagaaggtattcttcgcgatccttccagtactcttcgaggggaaacccgtctttttctgcacggtaagagcccaacatgtagaactgattgactgccttgtagggacagcatcccttctccactgggagagagtatgcttgggctgcattgcgcagcgaggtatgagtgagggcaaaagtgtccctgaccatgactttgaggaattgatacttgaagtcgatgtcatcacaggccccctgttcccagagttggaagtccacccgcttcttgtaggcggggttgggcaaagcgaaagtaacatcattgaagaggatcttgccggccctgggcatgaaatttcgggtgattctgaaaggctgagggacctctgctcggttattgataacctgagcggccaagacgatctcatcaaagccattgatgttgtgccccactatgtacagttctaagaatcgaggggtgcccctgacatgaggcagcttcttgagttcttcaaaagtgaggtctgtagggtcagtgagagcatagtgttcgagggcccattcgtgcacgtgagggttcgctttgaggaaggaggaccagaggtccactgccagtgctgtttgtaactggtcccggtactgacgaaaatgctgcccgactgccatcttttctggggtgacgcaatagaaggtttgggggtcctgccgccagcgatcccacttgagttttatggccaggtcataggcgatgttgacgagccgctggtctccagagagtttcatgaccagcatgaaggggattagctgcttgccaaaggaccccatccaggtgtaggtttccacatcgtaggtgaggaagagcctttctgtgcgaggatgagagccaatcgggaagaactggatctcctgccaccagttggaggaatggctgttgatgtgatggaagtagaactccctgcgacgcgccgagcattcatgcttgtgcttgtacagacggccgcagtactcgcatcgattcacgggatgcacctcatgaatgagttgtacctgacttcctttgacgagaaatttcagtggaaaattgaggcctggcgattgtacctcgcgctctactatgttgtctgcatcggcatgaccatcttctgtctcgatggtggtcatgctgacgagccctcgcgggaggcaagtccagacctcggcgcggcaggggcggagctcgaggacgagagcgcgcaggccggagctgtccagggtcctgagacgctgcggagtcaggttagtaggcagtgtcaggagattgacttgcatgatcttttcgagggcgtgagggaggttcagatggtacttgatctccacgggtccgttggtggagatgtcgatggcttgcagggttccgtgccccttgggcgctaccaccgtgcccttgtttttccttttgggcggcggtggctctgttgcttcttgcatgtttagaagcggtgtcgagggcgcgcaccgggcggcaggggcggttcgggacccggcggcatggccggcagtggtacgtcggcgccgcgcgcgggtaggttctggtactgcgccctcagaagactcgcatgcgccacgacgcggcggttgacatcctggatctgacgcctctgggtgaaagctaccggccccgtgagcttgaacctgaaagagagttcaacagaatcaatctcggtatcgttgacggcggcttgcctaaggatttcttgcacgtcgccagagttgtcctggtaggcgatctcggccatgaactgctcgatctcttcctcttgaagatctccgcggcccgctctctcgacggtggccgcgaggtcgttggagatacgcccaatgagttgagagaatgcattcatgcccgcctcgttccagacgcggctgtagaccacagcccccacgggatctctcgcgcgcatgaccacctgggcgaggttgagctccacgtggcgggtgaagaccgcatagttgcataggcgctggaaaaggtagttgagtgtggtggcgatgtgctcggtgacgaagaaatacatgatccatcgtctcagcggcatctcgctgacatcgcccagcgcttccaagcgctccatggcctcgtagaagtccacggcaaagttgaaaaactgggagttacgcgcggacacggtcaactcttcttccaaaagacggatgagttcggcgatggtggtgcgcacctcgagctcgaaagcccctgggatttcttcctcaatctcttcttcttccactaacatctcttcctcttcaggtggggctgcaggaggagggggaacgcggcgacgccggcggcgcacgggcagacggtcgatgaatctttcaatgacctctccgcggcggcggcgcatggtctcggtgacggcacgaccgttctccctgggtctcagagtgaagacgcctccgcgcatctccctgaagtggtgactgggaggctctccgttgggcagggacaccgcgctgattatgcattttattaattgccccgtaggtactccgcgcaaggacctgatcgtctcaagatccacgggatctgaaaacctttcgacgaaagcgtctaaccagtcgcaatcgcaaggtaggctgagcactgtttcttgcgggcgggggcggctagacgctcggtcggggttctctctttcttctccttcctcctctttggagggtgagacgatgctgctggtgatgaaattaaaataggcagttttgagacggcggatggtggcgaggagcaccaggtctttgggtccggcttgttggatgcgcaggcgatgggccattccccaagcattatcctgacatctggccagatctttatagtagtcttgcatgagtcgttccacgggcacttcttcttcgcccgctctgccatgcatgcgagtgatcccgaacccgcgcatgggctggacaagtgccaggtccgctacaaccctttctgcgaggatggcttgctgcacctgggtgagggtggcttggaagtcgtcaaagtccacgaagcggtggtaagccccggtgttgattgtgtaggagcagttggccatgactgaccagttgactgtctggtgcccagggcgcacaagctcggtatacttaaggcgcgagtatgcgcgggtgtcaaagatgtaatcgttacaggtgcgcaccaggtactggtagccgatgagaaagtgcggcggcggctggcggtataggggccatcgctctgtagccggggcgccaggggcgaggtcttccagcatgaggcggtgataaccgtagatgtacctggacatccaggtgataccggaggcggtggtggatgcccgcgggaactcgcgtacgcggttccagatgttgcgcagcggcatgaagtagttcatggtaggcacggtttggcccgtgagacgtgcacagtcgttgatgctctagacatacgggcaaaaacgaaagcggtcagcggctcgtctccgtggcctggaggctaagcgaacgggttgggctgcgcgtgtaccccggttcgaatctcggatcaggctggagccgcagctaacgtggtactggcactcccgtctcgacccaggcctgcacaaaacctccaggatacggaggcgggtcgtttttttttttttggctttttcctggatgggagccaatgctgcgtcaagctttagaacactcagttctcggggctgggagtggctcgcgcccgtagtctggagaatcaatcgccagggttgcgttgcggtgtgccccggttcgagtcttagcgcgccggatcggccggtttccgcgacaagcgagggtttggcagcctcgtcatttctaagaccccgccagccgacttctccagtttacgggagcgagccctctttttttgtttttttgttgcccagatgcatcccgtgctgcgacagatgcgcccccagcaacagcccccttctcagcagcagctacaacaacagccacaaaaggctcttcctgctcctgtaactactgcggctgcagccgtcagcggcgcggggcagcccgcctatgatctggacttggaagagggcgagggactggcgcgcctgggcgcaccatcgcccgagcggcacccgcgggtgcaactgaaaaaggactctcgcgaggcgtacgtgccccagcagaacctgttcagggacaggagcggcgaggagcctgaggaaatgcgagcttcccgctttaacgcgggtcgcgaactgcgtcacggtctggaccgaagacgggtgctgcgtgatgatgattttgaagtcgatgaagtgacaggaataagtcctgctagggcacatgtggccgcggccaacctagtatcagcttacgagcagaccgtgaaggaggagcgcaactttcaaaaatctttcaacaaccatgtgcgcaccctgattgcccgcgaggaagtgacactgggtctgatgcacctgtgggacctgatggaagccattacccagaaccccaccagcaaacctctaaccgctcagctgtttctggtggtgcaacatagtagagacaatgaggcatttagggaggcgctgttgaacattactgagcccgaggggagatggttgtatgatcttatcaatattctgcaaagtataatcgtgcaagaacgtagcctgggtctagctgagaaggtggctgctattaactactcggtcttgagcctgggcaagcactacgctcgcaagatctacaaaaccccatacgtacctatagacaaggaggtgaagatagatgggttttatatgcgcatgactctcaaggtgctgaccttgagtgacgatctgggagtgtaccgcaacgacaggatgcaccgcgcagtgagcgccagcagaaggcgtgagctgagcgacagagaacttatgcacagcttgcaaagagctctgactggggctggaaccgagggggaaaactactttgacatgggagcggacttgcagtggcagcccagtcgcagggccctggacgcagcagggtatgagcttccttacatagaagaggtggatgaaggccaggatgaggagggcgagtatctggaagactgatggcgcgaccatccatatttttgctagatggaacagcaggcaccggaccccgcaaaacgggcggcgctacagagccagccgtccggcattaactcctcggacgattggagccaggccatgcaacgcatcatggcgctgacgacccgcaaccccgaagcctttagacagcaaccccaggccaaccgcctttctgccatcctggaggccgtagtgccctcccgctccaaccccacacacgagaaggtcctggccatcgtgaacgcgctggtggagaacaaagccatacgtcccgatgaggctgggctggtatacaatgccctattggagcgcgtagcccgttacaacagcagcaacgtgcagaccaacctggaccggatggtgaccgatgtgcgcgaggccgtgtctcagcgcgagcggttccagcgagacgccaatttagggtcgctggtggctttgaacgccttcctcagcactcagcctgccaacgtgcctcgcggtcagcaagactacacaaactttctaagtgcattgagactcatggtggccgaagtccctcaaagcgaagtgtaccagtccgggccagactactttttccagaccagcagacagggcttgcagacagtgaacctgagccaggcttttaagaacctgaatggtctgtggggagtgcgcgccccagtgggagatcgggcgaccgtgtctagcttgctgacccccaactcccgcctactactgctcttggtagccccattcactgacagcggtagcatcgaccgtaattcgtacttgggctatctgttgaacctgtatcgcgaggccatagggcaaactcaggtagatgagcaaacctatcaagaaattacccaagtgagccgcgctctgggtcgggaggacactggcagcttggaagccaccttaaacttcttgctgaccaaccggtcgcagaagatccctcctcagtattcgcttaccgcggaggaggaacggatcctgagatacgtgcagcagagcgtgggactgttcctaatgcaggagggggcgactcctactgctgcgctcgatatgacagcccgaaacatggagcccagcatgtatgccagtaaccggccttttatcaataaactgctagactacttacacagggcggctgctatgaactctgattatttcaccaatgctatcctgaacccccattggctgcccccacctgggttctatacgggcgagtatgacatgcccgaccccaatgacgggtttttatgggacgatgtggacagtagtgttttctccccgcctcctggttataacacttggaagaaggaaggtggcgatagaaggcactcttccgtgtcactgtccggagcaacgggtgctgcagcggctcccgaggccgcaagtcctttccctagtttgccattttcgctaaacagtgtacgcagcagtgagctgggaagaataacccgtcctcgcttgatcggcgaggaggagtatttgaacgactccctgttgagacccgagagggagaagaatttccccaacaacgggatagaaagcttggttgacaaaatgaaccgctggaagacgtacgcgcacgatcacagggacgatccccgggcgctgggggatagccggggcatcgctacccgtaaacgccagtggcacgacaggcagcggggcctggtgtgggccgatgatgattccgccgacgacagcagcgtgttggacttgggtgggagtggtggtaacccgttcgctcacctgcgcccccgcgtcgggcgcctgatgtaagaaaccgaaaataaatactcaccaaggccatggcgaccagcgtgcgttcgtttcttctctgttatagctagtatgatgaggcgaaccgtgctaggcggagcggtggtgtatccggagggtcctcctccttcgtacgagagcgtgatgcagcaggcggcggcggcggcgatgcagccaccactggaggctccctttgtaccccctcggtacctggcacctacggaggggagaaacagcattcgttactcggagctggcaccattgtatgataccacccggttgtatttggtggacaacaagtccgcggacatcgcctcactgaactatcagaacgaccacagcaacttcctcaccacggtggtgcaaaacaatgactttacccccacggaggccagcacccagaccatcaactttgacgagcggtcgcgatggggcggtcagctgaagactatcatgcacaccaacatgcccaacgtgaacgagtacatgtttagcaacaagttcaaagctcgggtgatggtgtctagaaaggctcctgaaggtgtcacagtagatgacaattatgatcacaagcaggatattttggaatatgagtggtttgagtttactctaccggaagggaacttctcagccacaatgaccattgacctaatgaacaatgccatcattgataattaccttgaagtgggcagacagaatggagtgttggagagtgacattggtgttaaatttgacaccaggaactttagactgggttgggatccggaaactaagttgattatgcctggggtttacacctatgaggcattccatcctgacattgtattgttgcctggttgcggagttgactttactgaaagtcgccttagtaacttgcttggtatcaggaaaagacacccattccaggagggttttaagatcttgtatgaggatcttgaagggggtaatatcccggccctgttggatgtagaagcctataagaacagtaagaaagaacgagaagccaaaacagaagccgctaaagctgctgctattgctaaagccaacatagttgtcagcgaccctgtaagggtggctaatgccgaagaagtcagaggagacaactatacagcttcatctgttgcaactgaagaatcgctattggctgctgtggccgaaactacagagaccaaactcactattaaacctgtagaaaaagacagcaagagtagaagttacaatgtcttggaagataaagtgaatacagcctaccgcagctggtacctgtcctacaactatggtgaccctgaaaaaggagtccgttcctggacactgctcaccacctcggatgtcacctgtggagcagagcaggtgtactggtcgctcccagacatgatgcaggaccctgtcacattccgttccacgagacaagtcagcaactatccagtggtaggtgcagagctcatgccggtcttctcaaagagtttctacaacgagcaagccgtgtactcccagcagcttcgccagtccacctcgctcacgcacgtcttcaaccgcttccctgagaaccagatcctcatccgcccgccagcgcccaccattaccaccgtcagtgaaaacgttcctgctctcacagatcacgggaccctgccgttgcgcagcagtatccggggagtccagcgcgtgaccgttactgacgccagacgccgcacctgcccctacgtctacaaggccctgggcatagtcgcgccgcgcgtcctttcaagccgcactttctaaaaaaaaatgtccattcttatctcacctagtaataacaccggttggggcctgcgcgcgccaagcaagatgtacggaggtgctcgcaaacgctctacacagcaccctgtgcgcgtgcgcgggcacttccgcgctccatggggcgccctcaagggtcgtacccgcactagaaccaccgtcgatgatgtgatcgaccaggtggtggccgatgctcgtaattatactcctactgcacctacatctactgtggatgcagttattgacagcgtagtggctgacgcccgcgcctatgctcgccggaagagcaggcggagacgcatcgccaggcgccaccgggctactcccgctatgcgagcggcaagagctctgctgaggagggccaaacgcgtggggcgaagagctatgcttagagcggccagacgcgcggcttcaggtgccagtgccggcaggtcccgcaggcgcgcagccacggcggcagcagcggccattgccaacatggcccaaccgcgaagaggcaatgtgtactgggtgcgcgacgccaccaccggccagcgcgtgcccgtgcgcacccgcccccctcgctcttagaagatactgagcagtctccgatgttgtgtcccagcgaggatgtccaagcgcaaatacaaggaagagatgctccaggtcatcgcgcctgaaatctacggtccgccggtgaaggatgaaaaaaagccccgcaaaatcaagcgggtcaaaaaggacaaaaaggaagaagatggcaatgatggtctggcggagtttgtacgcgagttcgccccaaggcggcgagtgcagtggcgtggacgcaaagtgcagcctgtgctgagacctggaaccacggtggtctttacgcccggcgagcgctccagcactgcttttaagcggtcctatgatgaggtgtatggggatgatgatattctggagcaggcggccgaccgcctgggcgagtttgcttatggcaagcgctcccgctcgagccccaaggaggaggcggtgtccattcccttggacaatgggaatcccacccctagtctcaagccagtcaccctgcagcaagtgctgcccgtgcctccacgcagaggcaacaagcgagagggtgaggatctgtatcccactatgcaattgatggtgcccaagcgccagcggctggaggacgtgctggagaaaatgaaagtggatcccgatatacaacctgaggtcaaagtgagacccatcaagcaggtggcgccaggtttgggagtacaaaccgtagacatcaagattcccaccgagtcaatggaagtccaaaccgaacctgcaaagcccacaaccacctccattgaggtgcaaacggatccctggatgaccgcacccgttacaactccagctgctgtcaacaccactcgaagatcccggcgaaagtacggtccagcaagtttgctgatgccaaattatgctctgcacccatccattattccaactccgggttaccgaggcactcgctactaccgcagcaggagcagcacttcccgccgtcgccgcaaaacacctgcaagtcgtagtcatcgtcgtcgccgccgccccaccagcaatctgactcccgctgctctggtgcggagagtgtatcgcgatggccgcgcggatcccctgacgttaccgcgcgtacgctaccatccaagcatcacaacttaacaactgttgccgctgcctccttgcagatatggccctcacttgccgccttcgtgtccccattactggctaccgaggaagaaactcgcgccgtagaagagggatgttggggcgcggaatgcgacgccacaggcggcggcgcgctatcagcaagaggctggggggtggctttctgcctgctctgatccccatcatagccgcggcgatcggggcgataccaggcatagcttccgtggcggttcaggcctcgcagcgccactgacattggaaaaacttataaataaaacagaatggactctgatgctcctggtcctgtgactatgtttttgtagagatggaagacatcaatttttcatccctggctccgcgacacggcacgaggccgtacatgggcacctggagcgacatcggcaccagccaactgaacgggggcgccttcaattggagcagtatctggagcgggcttaaaaattttggctctaccataaaaacctatgggaacaaagcttggaacagcagcacagggcaggcattgaaaaataagcttaaagagcaaaacttccaacagaaggtggttgatggaatcgcctctggtatcaatggggtggtggatctggccaaccaggccgtgcagaaacagataaacagccgccttgacccgccgccgtcagcccctggtgaaatggaagtggaggaagatctccctccccttgaaaagcggggcgacaagcgtccgcgccccgatctggaggagacactagtcacacgctcagacgacccgccctcctacgaggaggcagtgaagcttggaatgcccaccaccagacctgtagcccccatggctaccggggtaatgaaaccttctcagtcacaccgacccgctaccttggacttgcctccccctgctgttgcagcgcctgctcgcaagcctgtcgctaccccgaagcccaccaccgtacagcccgtcgccgtagccagaccgcgtcctgggggcactccacgtccgaatgcaaactggcagagtactctgaacagcatcgtgggtctgggcgtgcaaagtgtaaagcgccgtcgctgcttttaaattaaatatggagtagcgcttaacttgcctgtctgtgtgtatgtgtcatcatcacgccgccgccgcagcaacagcagaggagcaaggaagaggtcgcgcgccgaggctgagttgatttcaagatggccaccccatcgatgctgccccagtgggcatacatgcacatcgccggacaggatgcttcggagtacctgagtccgggtctggtgcagttcgcccgcgccacagacacctacttcaatctggggaacaagtttaggaaccccaccgtggcgcccacccatgatgtgaccaccgaccgcagtcagcggctgatgctgcgctttgtgcccgttgaccgggaagacaatacctacgcatacaaagttcgatacaccttggctgtgggcgacaacagagtgctggatatggccagcactttctttgacattcggggtgtgttggatagaggtcctagcttcaagccatattctggcactgcttacaactcattggcccctaagggcgctcccaatacatctcagtggcttaataagggagatgaagaggatggggaagacgaccaacaagctacatacacttttggcaatgcgccagtaaaagccgaagctgaaattacaaaagaaggactgccaataggtttggaagttccatctgaaggtggccctaaacccatttatgctgataaactgtatcagccagaacctcaggtgggagaggaatcttggactgatacggatggcacagatgaaaaatatggaggcagagcacttaaacctgaaactaaaatgaaaccctgctacgggtctttcgctaaacctactaatgttaaaggcgggcaggcaaaagtgaagaaagaagaagaaggcaaggttgaatatgacattgacatgaactttttcgacctaagatcacaaatgactggcctcaagcctaaaattgtaatgtatgcagaaaatgtggatctagaaactcctgacactcatgtggtgtacaaacctggagcttcagatgctagctctcatgcaaaccttggtcaacagtccatgcccaatagacctaactatattggcttcagggacaacttcatcggactcatgtactacaacagtactggcaacatgggagtgctggctggacaagcgtctcagctaaatgcagtggttgacttgcaagacagaaacacagaattgtcatatcaactcttgcttgattctctgggggacagaaccagatatttcagtatgtggaatcaagcagtggatagctatgacccagatgtgcgtgttattgagaaccatggtgtggaagatgaacttcctaactattgttttccattggatggtgtaggtccgcgaatagacagttacaagggaattgagacaaatggtgatgaaaccactacttggaaagatttagagccaaagggcataagtgaaattgctaagggaaatccgtttgccatggaaattaacctccaagctaatctctggagaagttttctttattccaatgtggctctgtatctcccagactcctacaaatacaccccagccaatgtcactcttccaactaacaccaacacttatgactacatgaatgggcgggtggttcccccatccctggtggatacctacgtaaacattggcgccagatggtctttggatgccatggacaatgtcaacccctttaaccatcaccgcaacgctggcctgcgataccggtccatgcttttgggcaatggtcgttacgtgcctttccacattcaagtgcctcagaaattctttgctgtgaagaacctgctgcttctacccggttcttacacctacgagtggaacttcagaaaggatgtgaacatggtcctgcagagttcccttggtaatgatctccgggtcgatggtgccagcataagttttaccagcatcaatctctatgccaccttcttccccatggcccacaacactgcctccacccttgaagccatgctgcgcaatgacaccaatgatcaatcattcaatgactacctttctgctgccaacatgctctaccccatcccggccaacgctaccaacgttcccatctccattccctctcgcaactgggccgccttcagaggctggtccttcaccagactcaaaaccaaggagactccctctttgggatcagggttcgatccctactttgtttactctggttctataccctacctggatggtaccttctaccttaaccacactttcaagaaagtctccatcatgtttgactcttcagtgagctggcctggtaatgacagattgctaagtccaaatgagttcgaaatcaagcgcacagttgatggggaaggctacaatgtggcccaatgtaacatgaccaaagactggttcctggtccagatgcttgccaactacaacattggataccagggcttctacgttcctgagggttacaaggatcgcatgtactccttcttcagaaacttccagcccatgagtagacaggtggttgatgagattaactacaaagactataaagctgtcgccgtaccctaccagcataataactctggctttgtgggttacatggctcctaccatgcgtcagggtcaagcgtaccctgctaactacccataccccctaattggaaccactgcagtaaccagtgtcacccagaaaaaattcctgtgcgacaggaccatgtggcgcatcccattctctagcaacttcatgtccatgggtgcccttacagacctgggacagaacttgctgtatgccaactcggcccatgcgctggacatgacttttgaggtggatcccatggatgagcccaccctgctttatcttcttttcgaagtcttcgacgtggtcagagtgcaccagccacaccgcggcgtcatcgaggccgtctacctgcgcacaccgttctcggccggcaacgccaccacataagaagcctcttgcttcttgcaagcagcagctgcagccatgtcatgcgggtccggaaacggctccagcgagcaagagctcaaagccatcgtccgagacctgggctgcggaccctatttcctgggaacctttgacaagcgtttcccggggttcatggcccccgacaagctcgcctgcgccatagtcaacactgccggacgcgagacggggggagagcactggctggcttttggttggaacccgcgctccaacacctgctacctttttgatccttttgggttctcggatgagcgactcaaacagatttaccagtttgagtacgaggggctcctgcgccgcagtgcccttgctaccaaagaccgctgcatcaccctggaaaagtccacccagagcgtgcagggcccgcgctcagccgcctgtggacttttttgctgtatgttccttcatgcctttgtgcactggcccgaccgccccatgaacggaaaccccaccatgaagttgctgactggggtgtcaaacagcatgctccaatcaccccaagtccagcccaccctgcgccgcaaccaggaggcgctatatcgcttcctaaacacccactcatcttactttcgttctcaccgcgcacgcattgaaagggccaccgcgtttgaccgtatggatatgcaataagtcatgtaaaaccgtgttcaataaaaagcattttatttttacatgcactaaggctctggttttttgctcattcgttttcatcattcactcagaaatcaaatgggttctggcgggagtcagagtgacccgtgggcagggagacgttgcggaactgtaacctgttctgccacttgaactcggggatcaccagcttgggaactggaatttcgggaaaggtgtcttgccacaactttctggtcagttgcagggcgccaagcaggtcaggagcagagatcttgaaatcacagttggggccggcattctggacacgggagttgcggtacactgggttgcaacactggaacaccatcaaggctgggtgtctcacgcttgccagcacggtcgggtcactgatggtagtcacatccaagtcttcagcattggccattccaaagggggtcatcttacaggtctgcctgcccatcacgggagcgcagcctggcttgtggttgcaatcgcaatgaatggggatcagcatcatcctggcttggtcgggggttatccctgggtacacggccttcatgaaggcttcgtactgcttgaaagcttcctgagccttacttccctcggtgtaaaacatcccacaggacttgctggaaaattggttagtagcacagttggcatcattcacacagcagcgggcatcgttgttggccaactggaccacatttctgccccagcggttctgggtgatcttggctctgtctgggttctccttcatagcgcgctgcccgttttcgctcgccacatccatctcgataatgtggtccttctggatcatgatagtgccatgcaggcatttcaccttgccttcgtaatcggtgcatccatgagcccacagagcgcacccggtgcactcccaattattgtgggcgatctcagaataagaatgcaccaatccctgcatgaatcttcccatcatcgctgtcagggtcttcatgctactaaatgtcagcgggatgccacggtgctcctcgttcacatactggtggcagatacgcttgtactgctcgtgctgctctggcatcagcttgaaagaggttctcaggtcattatccagcctatacctctccattagcacagccatcacttccatgcccttctcccaggcagataccaggggcaagctcaaaggattcctaacagcaatagaagtagctcctttagctatagggtcattcttgtcgatcttctcaacacttctcttgccatccttctcaatgatgcgcaccggggggtagctgaagcccacggccaccaactgagcctgttctctttcttcttcgctgtcctggctgatgtcttgcagagggacatgcttggtcttcctgggcttcttcttgggagggatcgggggaggactgttgctccgttccggagacagggatgaccgcgaagtttcgcttaccagtaccacctggctctcgatagaagaatcggaccccacgcgacggtaggtgttcctcttcgggggcagaggtggaggcgactgagatgggctgcggtccggccttggaggcggatggctggcagagcccattccgcgttcgggggtgtgctcccgttggcggtcgcttgactgatttcctccgcggctggccattgtgttctcctaggcagagaaacaacagacatggaaactcagccatcactgccaacatcgctgcaagcgccatcacacctcgcccccagcagcgacgaggaggagagcttaaccaccccaccacccagtcccgctaccaccacctctaccctcgatgatgaggaggaggtcgacgcagcccaggagatgcaggcgcaggataatgtgaaagcggaagagattgaggcagatgtcgagcaggacccgggctatgtgacaccggcggagcacgaggaggagctgaaacgttttctagacagagaggatgacgaccgcccagagcatcaccaggaggctggcctcggggatcatgttgccgactacctctccgggcttgggagggaggacgtgctcctcaaacatctagcaaggcagtcgatcatagttaaagacgcactactcaacctcaccgaagtgcctatcagtgtggaagagcttagccgcgcctacgagctgaacctcttttcgcctcagataccccccaagcggcagcgaaacggcacctgcgaggccaaccctcgactcaacttctatccagcttttactgtccccgaagtgctggccacctaccacatcttttttaagaaccaaaagattccagtctcctgccgcgccaaccgcacccgcgcagatgcccttctcaacttgggtccgggagctcgcttacctgatatagcttccttggaagaggttccaaagatctttgagggtctgggaagtgatgagactcgggccgcaaatgctctgcaacagggagagaatggtatggatgaacatcacagcgctctagtggaactggagggtgacaatgcccggcttgcagtgctcaagcgcagtatcgtggtcacccattttgcctaccccgctgttaacctgccgcccaaagtcatgagcgctgtcatggaccatctgctcatcaaacgagcaagtccactttcagaaaaccagaacatgcaggatccagacgcctcggaggagggcaagccggtagtcagtgacgagcagctatctcgctggctgggtaccaactccccccgagatttggaagaaagacgcaagcttatgatggctgtagtgctagtaactgttgagttggagtgtctgcgccgcttttttaccgaccccgagaccctgcgcaagctagaggagaacctgcactacaccttcagacatggcttcgtgcgccaggcatgcaagatctccaacgtggagctcaccaacctggtttcatacatgggcattttgcatgagaaccggctagggcagagcgttctgcacaccaccctgaagggggaggcccgccgcgactacatccgagactgtgtctacctctacctctgccatacctggcagactggtatgggtgtgtggcaacagtgtttggaagagcagaaccttaaagagctggacaagctcttgcagagatccctcaaagccctgtggacaggttttgacgagcgcaccgtcgcctcggacctggcggacatcatcttccccgagcgtcttagggttactctgcgaaacggcctgccagacttcatgagccagagcatgcttaacaactttcgctctttcatcctggaacgctccggtatcctgcctgccacctgctgtgcgctgccctccgactttgtgcctctcacctaccgcgagtgcccaccgccgctatggagccactgctacctattccgcctggccaactacctctcctaccactcggatgtgatagaggatgtgagcggagacggcctgctggaatgccactgccgatgcaatttatgcacaccccaccgctccctcgcctgcaacccccagttgctaagcgagacccagatcatcggcaccttcgagttgcagggtcccaacagtgaaggcgaggggtcttctccggggcagagtctgaaactgacaccggggctgtggacctccgcctacctgcgcaagtttcatcccgaggactatcatccctatgagatcaggttctatgaggaccagtcacatcctcccaaagtcgagctctcagcctgcgtcatcacccagggggcaattctggcccaattgcaagccatccaaaaatcccgccaagaatttctgctgaaaaagggaagcggggtctaccttgacccccagaccggtgaggagctcaacacaaggttcccccaggatgtcccatcgccgaggaagcaagaagctgaaggtgcagctgtcacccccagaggatatggaggaagactgggacagtcaggcagaggaggagatggaagattgggacagccaggcagaggaggtggacagcctggaggaagacagtttggaggaggaagacgaggaggcagaggaggtggaagaagcaaccgccgccaaacagttgtcatcggcggcggagacaagcaagtccccagacagcagcacggctaccatctccgctccgggtcggggggcccagcggcggcccaacagtagatgggacgagaccgggcgatttccaaacccgaccaccgcttccaagaccggtaagaaggagcgacagggatacaagtcctggcgtggacataaaaacgctatcatctcctgcttgcatgaatgcgggggcaacatatccttcacccggcgatacctgcttttccaccacggtgtgaacttcccccgcaatatcttgcattactaccgtcacctccacagcccctactgcagtcagcaagtcccggcaaccccgacagaaaaagacagcagcgacaacggtgaccagaaaagcagcagttagaaaatccacaacaagtgcagcaggaggaggactgaggatcacagcgaacgagccagcgcagaccagagagctgaggaaccggatctttccaaccctctatgccatcttccagcagagtcgggggcaagagcaggaattgaaagtaaaaaaccgatctctgcgctcgctcaccagaagttgtttgtatcacaagagcgaagaccaacttcagcgcactctcgaggacgccgaggctctcttcaacaagtactgcgcgctgactcttaaagagtagcccttgcccgcgctcattcgaaaacggcgggaatcacgtcacccttggcagctgtcctttgccctcgtcatgagtaaagagattcccacgccttacatgtggagctatcagccccaaatggggttggcagcaggtgcttcccaggactactccacccgcatgaattggcttagcgccgggccctcaatgatatcacgggttaatgatatacgagcttatcgaaaccagttactcctagaacagtcagctcttaccaccacaccccgccaacaccttaatccccgaaattggcccgccgccctggtgtaccaggaaaatcccgctcccaccaccgtactacttcctcgagacgcccaggccgaagttcagatgactaacgcaggtgtacagctggcgggcggttccgccctatgtcgtcaccggcctcaacagagtataaaacgcctggtgatcagaggccgaggtatccagctcaacgacgagtcggttagctcttcgcttggtctgcgaccagacggagtcttccagatcgccggctgtgggagatcttccttcactcctcgtcaggctgtgctgactttggagagttcgtcctcgcagccccgctcgggcggcatcggaactctccagtttgtggaggagtttactccctctgtctacttcaaccccttctccggctctcctggccagtacccggacgagttcataccgaacttcgacgcaatcagcgagtcagtggatggctatgattgatgtctaatggtggcgcggctgagctagctcgactgcgacacctagaccactgccgccgctttcgctgtttcgcccgggaactcaccgagttcatctacttcgaactctccgaggagcaccctcagggtccggcccacggagtgcggattaccatcgaagggggaatagactctcgcctgcatcgcatcttctcccagcggcccgtgctgattgagcgcgaccagggaaatacaaccatctccatctactgcatctgtaaccaccccggattgcatgaaagcctttgctgtcttgtttgtgctgagtttaataaaaactgagttaagaccttcctacggactaccgcttcttcaatcaggactttacaacaccaaccagatcttccagaagacccagacccttcctcctctgatccaggactctaactctaccttaccagcaccctccactactaaccttcccgaaactaacaagcttggatctcatctgcaacaccgcctttcacgaagccttctttctgccaatactaccactcccaaaaccggaggtgagctccgcggtcttcctactgacgacccctgggtggtagcgggttttgtaacgttaggattagttgcgggtgggcttgtgctaatcctttgctacctatacacaccttgctgtgcatatttagtcatattgtgctgttggtttaagaaatgggggccatactagtcgtgcttgctttactttcgcttttgggtctgggctctgctaatctcaatcctcttgatcacaatccatgtctagacttcgacccagaaaattgcacacttacttttgcacccgacacaagccgtctctgtggagttcttattaagtgcggatgggactgcaggtccgttgaaattacacataataacaaaacatggaacaataccttatccaccacatgggagccaggagttcccgagtggtatactgtctctgtccgaggtcctgacggttccattcgcattagtaacaacactttcattttttctgaaatgtgcgatctggccatgtttatgagcaaacagtatgacctatggcctcctagcaaagagaacattgtggcattttccattgcttattgcttggtaacatgcatcatcactgctatcatttgtgtgtgcatacacttgcttatagttattcgccctagacaaagcaatgaggaaaaagagaaaatgccttaacctttttcctcataccttttctttacagcatggcttctgttacagctctaattattgccagcattgtcactgtcgctcacgggcaaacaattgtccatattaccttaggacataatcacactcttgtagggcccccaattacttcagaggttatttggaccaaacttggaagtgttgattattttgatataatttgcaacaaaactgaaccaatatttgtaatctgtaacagacaaaatctcacgttaattaatgttagcaaaatttataacggttactattatggttatgatagatccagtagccaatataaaaattacttagttcgcataactcagcccaaatcaacagtgccaactatgacaataattaaaatggctaataaagcattagaaaattttacattaccaacaacgcccaatgaaaaaaacattccaaattcaatgattgcaattattgcggcggtggcattgggaatggcactaataataatatgcatgttcctatatgcttgttgctataaaaagtttcaacataaacaggatccactactaaattttaacatttaattttttatacagatgatttccactacaatttttatcattactagccttgcagctgtaacttatggccgttcacacctaactgtacctgttggctcaacatgtacactacaaggaccccaagaaggctatgtcacttggtggagaatatatgataatggagggttcgctagaccatgtgatcagcctggtacaaaattttcatgcaacggaagagacttgaccattattaacataacattaaatgagcaaggcttctattatggaaccaactataaaaatagtttagattacaacattattgtagtgccagccaccacttctgctccccgcaaatccactttctctagcagcagtgccaaagcaagcacaattcctaaaacagcttctgctatgttaaagcttcgaaaaatcgctttaagtaattccacagcagctcccaatacaattcctaaatcaacaattggcatcattactgccgtggtagtgggattaatgattatatttttgtgcataatgtactacgcctgctgctatagaaaacatgaacaaaaaggtgatgcattactaaattttgatatttaattttttatagaattatgatattgtttcaatccaatgccactaacactatcaatgtgcagactactttaaaacatgacatggaaaaccacactacctcctatgcatacacaaatattcagcctaaatacgctatgcaactagaaatcaccatactaattgtaattggaattcttatactatctgttattctttattttatattctgccgtcaaatacccaatgttcatagaaattctaaaagacgtcccatctattctcctatgattagtcgtccccatatggctctgaatgaaatctaagatctttttttttcttttacagtatggtgaacatcaatcatgattcctagaaatttcttcttcaccatactcatctgtgctttcaatgtctgtgctactttcacagcagtagccactgcaagcccagactgtataggaccatttgcttcctatgcactttttgcctttgttacttgcatctgcgtgtgtagcatagtctgcctggttattaattttttccaactggtagactggatctttgtgcgaattgcctacctacgtcaccatcccgaataccgcaatcaaaatgttgcggcacttcttaggcttatttaaaaccatgcaggctatgctaccagttattttaattctgctactaccctgcattgccctaccttccaccgccactcgcgctacacctgaacaacttagaaaatgcaaatttcaacaaccatggtcatttcttgattgctaccatgaaaaatctgattttcccacatactggatagtgattgttggaataattaacatactttcatgtacctttttctcaatcacaatataccccacatttaattttgggtggaattctcccaatgcactgggttacccacaagagctagatgaacatatcccactacaacacatacaacaaccactagcattggtagagtatgaaaatgagccacaaccttcactgcctcctgctattagttacttcaacctaaccggcggagatgactgaaatactcaccacctccaattccgccgaggatctgcttgatatggacggccgcgcctcagaacagcgactcgcccaactacgcatccgccagcagcaggaacgcgtgaccaaagagctcagagatgtcatccaaattcaccaatgcaaaaaaggcatattttgtttggtaaaacaagccaagatatcctacgagatcaccgctactgaccatcgcctctcttacgaacttggcccccaacgacaaaaatttacatgcatggtgggaatcaaccctatagttatcacccagcaaagtggagatactaagggttgcattcactgctcttgcgattccaccgagtgcacctacaccctgctgaagaccctatgcggcctaagagacctgctacccatgaattaaaaattaataaaaaattacttacttgaaatcagcaataaggtctctgttgaaattttttcccagcagcacctcgcttccctcttcccaactctggtattctaaaccccgttcagcggcatactttctccatactttaaaggggatgtcaaattttagctcctctcctgtacccacgatcttcatgtctttcttcccagatgaccaagagagtccggctcagtgattccttcaaccctgtctacccctatgaagacgaaagcacctcccaacacccctttataaacccagggtttatttccccaaatggctttacacaaagcccagacggagttcttactttaaattgtttaaccccactaacaaccacaggcgggcctttacagttaaaagtgggagggggacttatagtggatgacactgatgggaccttacaagaaaacatacgtgttacagcacccattactaaaaataatcattctgtagaactatccattggaaatggattagaaacacaaaacaataaactatgtgccaaattgggaaatgggttaaaatttaacaacggtgacatttgtataaaggatagtattaacaccttatggactggaataaagcctccacctaactgtcaaatagtggaaaacactgatacaaacgatggcaaacttactttagtattagtaaaaaacggaggacttgttaatggctacgtatctctagttggtgtatcagacactgtgaaccaaatgttcacacaaaagtcagcaaccatacaattaagattatatttcgactcttctggaaatctattaactgatgaatcaaacttaaaaattccacttaaaaataaatcttctacagcaaccagtgaagctgcaaccagcagcaaagcctttatgccaagtactacagcttatccctttaacaccactactagggatagtgaaaactatattcatggaatatgttactatatgactagttatgatagaagtctagttcccttaaacatttctataatgctaaacagccgtacgatttcttccaatgttgcctatgccatacaatttgaatggaatctaaatgcaaaagaatctccagaaagcaacatagctacgctgaccacatccccctttttcttttcttatattagagaagacgacaactaaaaaataaagtttaagtgtttttatttaaaaatcacaaaattcgagtagttattttgcctcccccttcccatttaacagaatacaccaatctctccccacgcacagctttaaacatttggataccattagagatagacatagttttagtttccacattccaaacagtttcagagcgagccaatctggggtcagtgatacataaaaatgcatcgggatagtcttttaaagcgctttcacagtccaactgctgcggatgcgactccggagtctggatcacagtcatctggaagaagaacgatgggaatcataatccgaaaacggaatcgggcgattgtgtctcatcaaacccacaagcagccgctgtctgcgtcgctccgtgcgactgctgtttatgggatcggggtctgcagtgtcctgaagcatgattttaatagcccttaacattaactttctggtgcgatgcgcgcagcaacgcattctgatttcactgagattactacagtatgtacagcacattatcacaatattgtttaataaaccataattaaaagcgctccagccaaaactcatatctgatacaatcgcccctgcatgaccatcataccaaattttaatataaattaaatgtcgttccctcaaaaacacactacccacatacatgatctcttttggcatgtgcatattaacaatctgtctgtaccatggacaacgttggttaatcatgcaacccaatataaccttccggaaccacactgccaacaccgctcccccagccatgcattgaagtgaaccctgctgattacaatgacaatgaagaacccaattctctcgaccatgaatcacttgagactgaaaaatatctatagtagcacaacaaagacataaatgcatgcatcttctcataatttttaactcatctggatttaaaaacatatcccaaggaatgggaaactcttgcaaaacagtaaagctggcagaacaaggaagaccacgaacacaacttacactatgcatagtcatagtatcacaatctggcaacagcgggtggtcttcagtcatagaagctcgggtttcattttcctcacatcgtggtaactgggctctggtgtaagggtgatgtctggcgcatgatgtcgagcgtgcgcgcaaccttgtcataatggagttgtttcctgacattctcgtattttgtatagcaaaacgcggccctggcacaacacactcttcttcgtcttctatcctgccgcttagtgtgttccgtctgataattcaagtacagccacactcttaagttggtcaaaagaatgctggcttcagttgtaatcaaaactccatcatatttaattgttctaaggaaatcatccacggtagcatatgcaaatcccaaccaagcaatgcaactggattgcgtttcaagcagcagaggagagggaagagacggaagaatcatgttaatttttattccaaacgatctcgcagtacttcaaattgtagatcgcgcagatggcatctatcgcccccactgtgttggtgaaaaagcacagctaaatcaaaagaaatgcgattttcaaggtgctcaacggtggcttccaacaaagcctccacgcgcacatccaaaaacaaaagaataccaaaagaaggagcattttctaactcctcaaacatcatattacattcctgcaccattcccagataattttcagctttccagccttgaattattcgtgtcagttcttgtggtaaatccaaaccacacattacaaacaggtcccggagggcgccctccaccaccattcttaaacacaccctcataatgacaaaatatcttgctcctgtgtcacctgtagcaaattaagaatggcatcatcaattgacatgcccttggctctaagttcttctctaagttctagttgtaaatactctctcatattatcaccaaactgcttagccaaaagccccccgggaacaatagcaggggacgctacagtgcagtacaagcgcagacctccccaattggctccagcaaaaacaagattagaataagcatactgggaaccaccagtaatatcatcaaagttgctggaaatataatcaggcagaatttcttgtaaaaattgaataaaagaaaaattttccaaagaaacattcaaaatctctgggatgcaaatgcaataggttaccgcgctgcgctccaacattgttagttttgaattagtctgcaaaataaaagaaacaagcgtcatatcatagtagcctgtcgaacaggtggataaatcagtctttccatcacaagacaagccacagggtctccagctcgaccctcgtaaaacctgtcatcgtgattaaacaacagcaccgaaagttcctcgcggtggccagcatgaataattcttgatgaagcatataatccagacatgttagcatcagttaaagagaaaaaacagccaacatagcctctgggtataattatgcttaatcttaagtatagcaaagccacccctcgcggatacaaagtaaaaggcacaggagaataaaaaatataattatttctctgctgctgttcaggcaacgtcgcccccggtccatctaaatacacatacaaagcctcatcagccatggcttaccagacaaagtacagcgggcgcacaaagcacaagctctaaagaagctctaaagacactcttcaacctctccacaatatatacacaagccctaaactgacgtaatgggagtaaagtgtaaaaaatcccgccaagcccaacacacaccccgaaactgcgtcagcagggaaaagtacagtttcacttccgcattcccaacaagcgtaagttcctctttctcatggtacgtcacatccgattaacttgcaacgtcattttcccacggtcgcaccgccccttttagccgttcaccccgcagccaatcaccacacagcgcgcacttttttaaattacctcatttacatattggcaccattccatctataaggtatattatattgattg

SEQ ID NO: 154 - protein, 1468 aa, Unknown
  Description of Unknown: ET3 sequence
MQLELSTCVFLCLLPLGFSAIRRYYLGAVELSWDYRQSELLRELHVDTRFPATAPGALPLGPSVLYKKTVFVEFTDQLFSVARPRPPWMGLLGPTIQAEVYDTVVVTLKNMASHPVSLHAVGVSFWKSSEGAEYEDHTSQREKEDDKVLPGKSQTYVWQVLKENGPTASDPPCLTYSYLSHVDLVKDLNSGLIGALLVCREGSLTRERTQNLHEFVLLFAVFDEGKSWHSARNDSWTRAMDPAPARAQPAMHTVNGYVNRSLPGLIGCHKKSVYWHVIGMGTSPEVHSIFLEGHTFLVRHHRQASLEISPLTFLTAQTFLMDLGQFLLFCHISSHHHGGMEAHVRVESCAEEPQLRRKADEEEDYDDNLYDSDMDVVRLDGDDVSPFIQIRSVAKKHPKTWVHYIAAEEEDWDYAPLVLAPDDRSYKSQYLNNGPQRIGRKYKKVRFMAYTDETFKTREAIQHESGILGPLLYGEVGDTLLIIFKNQASRPYNIYPHGITDVRPLYSRRLPKGVKHLKDFPILPGEIFKYKWTVTVEDGPTKSDPRCLTRYYSSFVNMERDLASGLIGPLLICYKESVDQRGNQIMSDKRNVILFSVFDENRSWYLTENIQRFLPNPAGVQLEDPEFQASNIMHSINGYVFDSLQLSVCLHEVAYWYILSIGAQTDFLSVFFSGYTFKHKMVYEDTLTLFPFSGETVFMSMENPGLWILGCHNSDFRNRGMTALLKVSSCDKNTGDYYEDSYEDISAYLLSKNNAIEPRSFAQNSRPPSASAPKPPVLRRHQRDISLPTFQPEEDKMDYDDIFSTETKGEDFDIYGEDENQDPRSFQKRTRHYFIAAVEQLWDYGMSESPRALRNRAQNGEVPRFKKVVFREFADGSFTQPSYRGELNKHLGLLGPYIRAEVEDNIMVTFKNQASRPYSFYSSLISYPDDQEQGAEPRHNFVQPNETRTYFWKVQHHMAPTEDEFDCKAWAYFSDVDLEKDVHSGLIGPLLICRANTLNAAHGRQVTVQEFALFFTIFDETKSWYFTENVERNCRAPCHLQMEDPTLKENYRFHAINGYVMDTLPGLVMAQNQRIRWYLLSMGSNENIHSIHFSGHVFSVRKKEEYKMAVYNLYPGVFETVEMLPSKVGIWRIECLIGEHLQAGMSTTFLVYSKKCQTPLGMASGHIRDFQITASGQYGQWAPKLARLHYSGSINAWSTKEPFSWIKVDLLAPMIIHGIKTQGARQKFSSLYISQFIIMYSLDGKKWQTYRGNSTGTLMVFFGNVDSSGIKHNIFNPPIIARYIRLHPTHYSIRSTLRMELMGCDLNSCSMPLGMESKAISDAQITASSYFTNMFATWSPSKARLHLQGRSNAWRPQVNNPKEWLQVDFQKTMKVTGVTTQGVKSLLTSMYVKEFLISSSQDGHQWTLFFQNGKVKVFQGNQDSFTPVVNSLDPPLLTRYLRIHPQSWVHQIALRMEVLGCEAQDLYV

SEQ ID NO: 155 - protein, 147 aa, Unknown
  Description of Unknown: beta-globin sequence
MVHLTPEEKSAVTALWGKVNVDEVGGEALGRLLVVYPWTQRFFESFGDLSTPDAVMGNPKVKAHGKKVLGAFSDGLAHLDNLKGTFATLSELHCDKLHVDPENFRLLGNVLVCVLAHHFGKEFTPPVQAAYQKVVAGVANALAHKYH

SEQ ID NO: 156 - protein, 147 aa, Unknown
  Description of Unknown: gamma-globin sequence
MGHFTEEDKATITSLWGKVNVEDAGGETLGRLLVVYPWTQRFFDSFGNLSSASAIMGNPKVKAHGKKVLTSLGDATKHLDDLKGTFAQLSELHCDKLHVDPENFKLLGNVLVTVLAIHFGKEFTPEVQASWQKMVTAVASALSSRYH

SEQ ID NO: 157 - protein, 42 aa, Human mastadenovirus B
MAKRARLSTSFNPVYPYEDESSSQHPFINPGFISPDGFTQSP

SEQ ID NO: 158 - protein, 42 aa, Unknown
  Description of Unknown: Human adenovirus 7 sequence
MTKRVRLSDSFNPVYPYEDESTSQHPFINPGFISPNGFTQSP

SEQ ID NO: 159 - protein, 42 aa, Human mastadenovirus B; identical to SEQ ID NO: 158

SEQ ID NO: 160 - protein, 42 aa, Unknown; identical to SEQ ID NO: 158
  Description of Unknown: Human adenovirus 14 sequence

SEQ ID NO: 161 - protein, 42 aa, Unknown
  Description of Unknown: Human adenovirus 16 sequence
MAKRARLSSSFNPVYPYEDESSSQHPFINPGFISSNGFAQSP

SEQ ID NO: 162 - protein, 42 aa, Unknown; identical to SEQ ID NO: 158
  Description of Unknown: Human adenovirus 21 sequence

SEQ ID NO: 163 - protein, 42 aa, Unknown; identical to SEQ ID NO: 158
  Description of Unknown: Human adenovirus 34 sequence

SEQ ID NO: 164 - protein, 42 aa, Unknown
  Description of Unknown: Human adenovirus D37 sequence
MSKRLRVEDDFNPVYPYGYARNQNIPFLTPPFVSSDGFKNFP

SEQ ID NO: 165 - protein, 42 aa, Unknown; identical to SEQ ID NO: 158
  Description of Unknown: Human adenovirus 50 sequence

SEQ ID NO: 166 - DNA, 126 bp, Human mastadenovirus B
atggccaagcgagctcggctaagcacttccttcaacccggtgtacccttatgaagatgaaagcagctcacaacacccatttataaatcctggtttcatttcccctgacgggttcacacaaagtcca

SEQ ID NO: 167 - DNA, 126 bp, Unknown
  Description of Unknown: Human adenovirus 7 sequence
atgaccaagagagtccggctcagtgattccttcaaccctgtctacccctatgaagatgaaagcacctcccaacacccctttataaacccagggtttatttccccaaatggctttacacaaagccca

SEQ ID NO: 168 - DNA, 126 bp, Human mastadenovirus B
atgaccaagagagtccggctcagtgactccttcaaccctgtctacccctatgaagatgaaagcacctcccaacacccctttataaacccagggtttatttccccaaatggcttcacacaaagccca

SEQ ID NO: 169 - DNA, 126 bp, Unknown
  Description of Unknown: Human adenovirus 14 sequence
atgaccaagagagtccggctcagtgactccttcaaccctgtctacccctatgaagatgaaagcacctcccaacacccctttataaacccagggtttatttccccaaatggcttcacccaaagccca

SEQ ID NO: 170 - DNA, 126 bp, Unknown
  Description of Unknown: Human adenovirus 16 sequence
atggccaaacgagctcggctaagcagctccttcaatccggtctacccctatgaagatgaaagcagctcacaacacccctttataaaccctggtttcatttcctcaaatggttttgcacaaagccca

SEQ ID NO: 171 - DNA, 126 bp, Unknown; identical to SEQ ID NO: 167
  Description of Unknown: Human adenovirus 21 sequence

SEQ ID NO: 172 - DNA, 126 bp, Unknown; identical to SEQ ID NO: 168
  Description of Unknown: Human adenovirus 34 sequence

SEQ ID NO: 173 - DNA, 126 bp, Unknown
  Description of Unknown: Human adenovirus D37 sequence
atgtcaaagaggctccgggtggaagatgacttcaaccccgtctacccctatggctacgcgcggaatcagaatatccccttcctcactcccccctttgtctcctccgatggattcaaaaacttcccc

SEQ ID NO: 174 - DNA, 126 bp, Unknown
  Description of Unknown: Human adenovirus 50 sequence
atgaccaagagagtccggctcagtgattccttcaaccctgtctacccctatgaagacgaaagcacctcccaacacccctttataaacccagggtttatttccccaaatggctttacacaaagccca

SEQ ID NO: 175 - protein, 8 aa, Artificial Sequence
  Description of Artificial Sequence: Synthetic peptide
SGGSSGGS
